United States Patent Application Publication US 2026/0297589 A1, published October 1, 2026 (application 19/394,362).

The application's sequence listing, which the Patent Office published only in electronic form, follows.

SEQUENCE LISTING (688 sequences)

SEQ ID NO: 1 - RNA, 2361 nt, Homo sapiens
  source 1..2361: mol_type = mRNA
ggcaggagcaaaggcgccatggctgtggagtcccagggcggacgcccacttgtcctgggcctgctgctgtgtgtgctgggcccagtggtgtcccatgctgggaagatactgttgatcccagtggatggcagccactggctgagcatgcttggggccatccagcagctgcagcagaggggacatgaaatagttgtcctagcacctgacgcctcgttgtacatcagagacggagcattttacaccttgaagacgtaccctgtgccattccaaagggaggatgtgaaagagtcttttgttagtctcgggcataatgtttttgagaatgattctttcctgcagcgtgtgatcaaaacatacaagaaaataaaaaaggactctgctatgcttttgtctggctgttcccacttactgcacaacaaggagctcatggcctccctggcagaaagcagctttgatgtcatgctgacggaccctttccttccttgcagccccatcgtggcccagtacctgtctctgcccactgtattcttcttgcatgcactgccatgcagcctggaatttgaggctacccagtgccccaacccattctcctacgtgcccaggcctctctcctctcattcagatcacatgaccttcctgcagcgggtgaagaacatgctcattgccttttcacagaactttctgtgcgacgtggtttattccccgtatgcaacccttgcctcagaattccttcagagagaggtgactgtccaggacctattgagctctgcatctgtctggctgtttagaagtgactttgtgaaggattaccctaggcccatcatgcccaatatggtttttgttggtggaatcaactgccttcaccaaaatccactatcccaggaatttgaagcctacattaatgcttctggagaacatggaattgtggttttctctttgggatcaatggtctcagaaattccagagaagaaagctatggcaattgctgatgctttgggcaaaatccctcagacagtcctgtggcggtacactggaacccgaccatcgaatcttgcgaacaacacgatacttgttaagtggctaccccaaaacgatctgcttggtcacccgatgacccgtgcctttatcacccatgctggttcccatggtgtttatgaaagcatatgcaatggcgttcccatggtgatgatgcccttgtttggtgatcagatggacaatgcaaagcgcatggagactaagggagctggagtgaccctgaatgttctggaaatgacttctgaagatttagaaaatgctctaaaagcagtcatcaatgacaaaagttacaaggagaacatcatgcgcctctccagccttcacaaggaccgcccggtggagccgctggacctggccgtgttctgggtggagtttgtgatgaggcacaagggcgcgccacacctgcgccccgcagcccacgacctcacctggtaccagtaccattccttggacgtgattggtttcctcttggccgtcgtgctgacagtggccttcatcacctttaaatgttgtgcttatggctaccggaaatgcttggggaaaaaagggcgagttaagaaagcccacaaatccaagacccattgagaagtgggtgggaaataaggtaaaattttgaaccattccctagtcatttccaaacttgaaaacagaatcagtgttaaattcattttattcttattaaggaaatactttgcataaattaatcagccccagagtgctttaaaaaattctcttaaataaaaataatagactcgctagtcagtaaagatatttgaatatgtatcgtgccccctctggtgtctttgatcaggatgacatgtgccatttttcagaggacgtgcagacaggctggcattctagattacttttcttactctgaaacatggcctgtttgggagtgcgggattcaaaggtggtcccacggctgcccctactgcaaatggcagttttaatcttatcttttggcttctgcagatggttgcaattgatccttaaccaataatggtcagtcctcatctctgtcgtgcttcataggtgccaccttgtgtgtttaaagaagggaagctttgtacctttagagtgtaggtgaaatgaatgaatggcttggagtgcactgagaacagcatatgatttcttgctttggggaaaaagaatgatgctatgaaattggtgggtggtgtatttgagaagataatcattgcttatgtcaaatggagctgaatttgataaaaacccaaaatacagctatgaagtgctgggcaagtttactttttttctgatgtttcctacaactaaaaataaattaataaatttatataaattcta

SEQ ID NO: 2 - RNA, 2361 nt, Homo sapiens
  source 1..2361: mol_type = mRNA
tagaatttatataaatttattaatttatttttagttgtaggaaacatcagaaaaaaagtaaacttgcccagcacttcatagctgtattttgggtttttatcaaattcagctccatttgacataagcaatgattatcttctcaaatacaccacccaccaatttcatagcatcattctttttccccaaagcaagaaatcatatgctgttctcagtgcactccaagccattcattcatttcacctacactctaaaggtacaaagcttcccttctttaaacacacaaggtggcacctatgaagcacgacagagatgaggactgaccattattggttaaggatcaattgcaaccatctgcagaagccaaaagataagattaaaactgccatttgcagtaggggcagccgtgggaccacctttgaatcccgcactcccaaacaggccatgtttcagagtaagaaaagtaatctagaatgccagcctgtctgcacgtcctctgaaaaatggcacatgtcatcctgatcaaagacaccagagggggcacgatacatattcaaatatctttactgactagcgagtctattatttttatttaagagaattttttaaagcactctggggctgattaatttatgcaaagtatttccttaataagaataaaatgaatttaacactgattctgttttcaagtttggaaatgactagggaatggttcaaaattttaccttatttcccacccacttctcaatgggtcttggatttgtgggctttcttaactcgcccttttttccccaagcatttccggtagccataagcacaacatttaaaggtgatgaaggccactgtcagcacgacggccaagaggaaaccaatcacgtccaaggaatggtactggtaccaggtgaggtcgtgggctgcggggcgcaggtgtggcgcgcccttgtgcctcatcacaaactccacccagaacacggccaggtccagcggctccaccgggcggtccttgtgaaggctggagaggcgcatgatgttctccttgtaacttttgtcattgatgactgcttttagagcattttctaaatcttcagaagtcatttccagaacattcagggtcactccagctcccttagtctccatgcgctttgcattgtccatctgatcaccaaacaagggcatcatcaccatgggaacgccattgcatatgctttcataaacaccatgggaaccagcatgggtgataaaggcacgggtcatcgggtgaccaagcagatcgttttggggtagccacttaacaagtatcgtgttgttcgcaagattcgatggtcgggttccagtgtaccgccacaggactgtctgagggattttgcccaaagcatcagcaattgccatagctttcttctctggaatttctgagaccattgatcccaaagagaaaaccacaattccatgttctccagaagcattaatgtaggcttcaaattcctgggatagtggattttggtgaaggcagttgattccaccaacaaaaaccatattgggcatgatgggcctagggtaatccttcacaaagtcacttctaaacagccagacagatgcagagctcaataggtcctggacagtcacctctctctgaaggaattctgaggcaagggttgcatacggggaataaaccacgtcgcacagaaagttctgtgaaaaggcaatgagcatgttcttcacccgctgcaggaaggtcatgtgatctgaatgagaggagagaggcctgggcacgtaggagaatgggttggggcactgggtagcctcaaattccaggctgcatggcagtgcatgcaagaagaatacagtgggcagagacaggtactgggccacgatggggctgcaaggaaggaaagggtccgtcagcatgacatcaaagctgctttctgccagggaggccatgagctccttgttgtgcagtaagtgggaacagccagacaaaagcatagcagagtccttttttattttcttgtatgttttgatcacacgctgcaggaaagaatcattctcaaaaacattatgcccgagactaacaaaagactctttcacatcctccctttggaatggcacagggtacgtcttcaaggtgtaaaatgctccgtctctgatgtacaacgaggcgtcaggtgctaggacaactatttcatgtcccctctgctgcagctgctggatggccccaagcatgctcagccagtggctgccatccactgggatcaacagtatcttcccagcatgggacaccactgggcccagcacacacagcagcaggcccaggacaagtgggcgtccgccctgggactccacagccatggcgcctttgctcctgcc

SEQ ID NO: 3 - RNA, 21 nt, synthetic construct
  source 1..21: mol_type = other RNA
  modified_base 1: mod_base = OTHER; note = 2'-O-methylguanosine-3'-phosphorothioate
  modified_base 2: mod_base = OTHER; note = 2'-O-methylcytidine-3'-phosphorothioate
  modified_base 3: mod_base = OTHER; note = 2'-O-methylcytidine-3'-phosphate
  modified_base 4: mod_base = OTHER; note = 2'-O-methyluridine-3'-phosphate
  modified_base 5: mod_base = OTHER; note = 2'-O-methyluridine-3'-phosphate
  modified_base 6: mod_base = OTHER; note = 2'-O-methyluridine-3'-phosphate
  modified_base 7: mod_base = OTHER; note = 2'-deoxy-2'-fluorouridine-3'-phosphate
  modified_base 8: mod_base = OTHER; note = 2'-O-methylcytidine-3'-phosphate
  modified_base 9: mod_base = OTHER; note = 2'-deoxy-2'-fluoroadenosine-3'-phosphate
  modified_base 10: mod_base = OTHER; note = 2'-deoxy-2'-fluorocytidine-3'-phosphate
  modified_base 11: mod_base = OTHER; note = 2'-deoxy-2'-fluoroadenosine-3'-phosphate
  modified_base 12: mod_base = OTHER; note = 2'-O-methylguanosine-3'-phosphate
  modified_base 13: mod_base = OTHER; note = 2'-O-methyladenosine-3'-phosphate
  modified_base 14: mod_base = OTHER; note = 2'-O-methyladenosine-3'-phosphate
  modified_base 15: mod_base = OTHER; note = 2'-O-methylcytidine-3'-phosphate
  modified_base 16: mod_base = OTHER; note = 2'-O-methyluridine-3'-phosphate
  modified_base 17: mod_base = OTHER; note = 2'-O-methyluridine-3'-phosphate
  modified_base 18: mod_base = OTHER; note = 2'-O-methyluridine-3'-phosphate
  modified_base 19: mod_base = OTHER; note = 2'-O-methylcytidine-3'-phosphate
  modified_base 20: mod_base = OTHER; note = 2'-O-methyluridine-3'-phosphate
  modified_base 21: mod_base = OTHER; note = 2'-O-methyluridine-3'-phosphate ((2S,4R)-1-[29-[[2-(acetylamino)-2-deoxy-beta-D-galactopyra nosyl]oxy]-14,14-bis[[3-[[3-[[5-[[2-(acetylamino)-2-deoxy-b eta-D-galactopyranosyl]oxy]-1-oxopentyl]amino]propyl]amino] -3-oxopropoxy]methyl]-1,12,19,25-tetraoxo-16-oxa-13,20,24-t riazanonacos-1-yl]-4-hydroxy-2-pyrrolidinyl)methyl ester
gccttttcacagaactttctt

SEQ ID NO: 4 - RNA, 23 nt, synthetic construct
  source 1..23: mol_type = other RNA
  modified_base 1: mod_base = OTHER; note = 2'-O-methyladenosine-3'-phosphorothioate
  modified_base 2: mod_base = OTHER; note = 2'-deoxy-2'-fluoroadenosine-3'-phosphorothioate
  modified_base 3: mod_base = OTHER; note = 2'-O-methylguanosine-3'-phosphate
  modified_base 4: mod_base = OTHER; note = 2'-O-methyladenosine-3'-phosphate
  modified_base 5: mod_base = OTHER; note = 2'-O-methyladenosine-3'-phosphate
  modified_base 6: mod_base = OTHER; note = 2'-deoxy-2'-fluoroadenosine-3'-phosphate
  modified_base 7: mod_base = OTHER; note = 2'-O-methylguanosine-3'-phosphate
  modified_base 8: mod_base = OTHER; note = 2'-deoxy-2'-fluorouridine-3'-phosphate
  modified_base 9: mod_base = OTHER; note = 2'-deoxy-2'-fluorouridine-3'-phosphate
  modified_base 10: mod_base = OTHER; note = 2'-O-methylcytidine-3'-phosphate
  modified_base 11: mod_base = OTHER; note = 2'-O-methyluridine-3'-phosphate
  modified_base 12: mod_base = OTHER; note = 2'-O-methylguanosine-3'-phosphate
  modified_base 13: mod_base = OTHER; note = 2'-O-methyluridine-3'-phosphate
  modified_base 14: mod_base = OTHER; note = 2'-deoxy-2'-fluoroguanosine-3'-phosphate
  modified_base 15: mod_base = OTHER; note = 2'-O-methyladenosine-3'-phosphate
  modified_base 16: mod_base = OTHER; note = 2'-deoxy-2'-fluoroadenosine-3'-phosphate
  modified_base 17: mod_base = OTHER; note = 2'-O-methyladenosine-3'-phosphate
  modified_base 18: mod_base = OTHER; note = 2'-O-methyladenosine-3'-phosphate
  modified_base 19: mod_base = OTHER; note = 2'-O-methylguanosine-3'-phosphate
  modified_base 20: mod_base = OTHER; note = 2'-O-methylguanosine-3'-phosphate
  modified_base 21: mod_base = OTHER; note = 2'-O-methylcytidine-3'-phosphorothioate
  modified_base 22: mod_base = OTHER; note = 2'-O-methyladenosine-3'-phosphorothioate
  modified_base 23: mod_base = OTHER; note = 2'-O-methyladenosine
aagaaagttctgtgaaaaggcaa

SEQ ID NO: 5 - RNA, 21 nt, synthetic construct
  source 1..21: mol_type = other RNA
  modified_base 1: mod_base = OTHER; note = 2'-O-methylcytidine-3'-phosphorothioate
  modified_base 2: mod_base = OTHER; note = 2'-O-methyladenosine-3'-phosphorothioate
  modified_base 3: mod_base = OTHER; note = 2'-O-methyluridine-3'-phosphate
  modified_base 4: mod_base = OTHER; note = 2'-O-methylguanosine-3'-phosphate
  modified_base 5: mod_base = OTHER; note = 2'-O-methylcytidine-3'-phosphate
  modified_base 6: mod_base = OTHER; note = 2'-O-methyluridine-3'-phosphate
  modified_base 7: mod_base = OTHER; note = 2'-deoxy-2'-fluorocytidine-3'-phosphate
  modified_base 8: mod_base = OTHER; note = 2'-O-methyladenosine-3'-phosphate
  modified_base 9: mod_base = OTHER; note = 2'-deoxy-2'-fluorouridine-3'-phosphate
  modified_base 10: mod_base = OTHER; note = 2'-deoxy-2'-fluorouridine-3'-phosphate
  modified_base 11: mod_base = OTHER; note = 2'-deoxy-2'-fluoroguanosine-3'-phosphate
  modified_base 12: mod_base = OTHER; note = 2'-O-methylcytidine-3'-phosphate
  modified_base 13: mod_base = OTHER; note = 2'-O-methylcytidine-3'-phosphate
  modified_base 14: mod_base = OTHER; note = 2'-O-methyluridine-3'-phosphate
  modified_base 15: mod_base = OTHER; note = 2'-O-methyluridine-3'-phosphate
  modified_base 16: mod_base = OTHER; note = 2'-O-methyluridine-3'-phosphate
  modified_base 17: mod_base = OTHER; note = 2'-O-methyluridine-3'-phosphate
  modified_base 18: mod_base = OTHER; note = 2'-O-methylcytidine-3'-phosphate
  modified_base 19: mod_base = OTHER; note = 2'-O-methyladenosine-3'-phosphate
  modified_base 20: mod_base = OTHER; note = 2'-O-methylcytidine-3'-phosphate
  modified_base 21: mod_base = OTHER; note = 2'-O-methyluridine-3'-phosphate ((2S,4R)-1-[29-[[2-(acetylamino)-2-deoxy-beta-D-galactopyra nosyl]oxy]-14,14-bis[[3-[[3-[[5-[[2-(acetylamino)-2-deoxy-b eta-D-galactopyranosyl]oxy]-1-oxopentyl]amino]propyl]amino] -3-oxopropoxy]methyl]-1,12,19,25-tetraoxo-16-oxa-13,20,24-t riazanonacos-1-yl]-4-hydroxy-2-pyrrolidinyl)methyl ester
catgctcattgccttttcact

SEQ ID NO: 6 - RNA, 23 nt, synthetic construct
  source 1..23: mol_type = other RNA
  modified_base 1: mod_base = OTHER; note = 2'-O-methyladenosine-3'-phosphorothioate
  modified_base 2: mod_base = OTHER; note = 2'-deoxy-2'-fluoroguanosine-3'-phosphorothioate
  modified_base 3: mod_base = OTHER; note = 2'-O-methyluridine-3'-phosphate
  modified_base 4: mod_base = OTHER; note = 2'-O-methylguanosine-3'-phosphate
  modified_base 5: mod_base = OTHER; note = 2'-O-methyladenosine-3'-phosphate
  modified_base 6: mod_base = OTHER; note = 2'-deoxy-2'-fluoroadenosine-3'-phosphate
  modified_base 7: mod_base = OTHER; note = 2'-O-methyladenosine-3'-phosphate
  modified_base 8: mod_base = OTHER; note = 2'-deoxy-2'-fluoroadenosine-3'-phosphate
  modified_base 9: mod_base = OTHER; note = 2'-deoxy-2'-fluoroguanosine-3'-phosphate
  modified_base 10: mod_base = OTHER; note = 2'-O-methylguanosine-3'-phosphate
  modified_base 11: mod_base = OTHER; note = 2'-O-methylcytidine-3'-phosphate
  modified_base 12: mod_base = OTHER; note = 2'-O-methyladenosine-3'-phosphate
  modified_base 13: mod_base = OTHER; note = 2'-O-methyladenosine-3'-phosphate
  modified_base 14: mod_base = OTHER; note = 2'-deoxy-2'-fluorouridine-3'-phosphate
  modified_base 15: mod_base = OTHER; note = 2'-O-methylguanosine-3'-phosphate
  modified_base 16: mod_base = OTHER; note = 2'-deoxy-2'-fluoroadenosine-3'-phosphate
  modified_base 17: mod_base = OTHER; note = 2'-O-methylguanosine-3'-phosphate
  modified_base 18: mod_base = OTHER; note = 2'-O-methylcytidine-3'-phosphate
  modified_base 19: mod_base = OTHER; note = 2'-O-methyladenosine-3'-phosphate
  modified_base 20: mod_base = OTHER; note = 2'-O-methyluridine-3'-phosphate
  modified_base 21: mod_base = OTHER; note = 2'-O-methylguanosine-3'-phosphorothioate
  modified_base 22: mod_base = OTHER; note = 2'-O-methyluridine-3'-phosphorothioate
  modified_base 23: mod_base = OTHER; note = 2'-O-methyluridine
agtgaaaaggcaatgagcatgtt

SEQ ID NO: 7 - RNA, 21 nt, synthetic construct
  source 1..21: mol_type = other RNA
  modified_base 1: mod_base = OTHER; note = 2'-O-methyladenosine-3'-phosphorothioate
  modified_base 2: mod_base = OTHER; note = 2'-O-methyluridine-3'-phosphorothioate
  modified_base 3: mod_base = OTHER; note = 2'-O-methylguanosine-3'-phosphate
  modified_base 4: mod_base = OTHER; note = 2'-O-methylcytidine-3'-phosphate
  modified_base 5: mod_base = OTHER; note = 2'-O-methyluridine-3'-phosphate
  modified_base 6: mod_base = OTHER; note = 2'-O-methylcytidine-3'-phosphate
  modified_base 7: mod_base = OTHER; note = 2'-deoxy-2'-fluoroadenosine-3'-phosphate
  modified_base 8: mod_base = OTHER; note = 2'-O-methyluridine-3'-phosphate
  modified_base 9: mod_base = OTHER; note = 2'-deoxy-2'-fluorouridine-3'-phosphate
  modified_base 10: mod_base = OTHER; note = 2'-deoxy-2'-fluoroguanosine-3'-phosphate
  modified_base 11: mod_base = OTHER; note = 2'-deoxy-2'-fluorocytidine-3'-phosphate
  modified_base 12: mod_base = OTHER; note = 2'-O-methylcytidine-3'-phosphate
  modified_base 13: mod_base = OTHER; note = 2'-O-methyluridine-3'-phosphate
  modified_base 14: mod_base = OTHER; note = 2'-O-methyluridine-3'-phosphate
  modified_base 15: mod_base = OTHER; note = 2'-O-methyluridine-3'-phosphate
  modified_base 16: mod_base = OTHER; note = 2'-O-methyluridine-3'-phosphate
  modified_base 17: mod_base = OTHER; note = 2'-O-methylcytidine-3'-phosphate
  modified_base 18: mod_base = OTHER; note = 2'-O-methyladenosine-3'-phosphate
  modified_base 19: mod_base = OTHER; note = 2'-O-methylcytidine-3'-phosphate
  modified_base 20: mod_base = OTHER; note = 2'-O-methyladenosine-3'-phosphate
  modified_base 21: mod_base = OTHER; note = 2'-O-methyluridine-3'-phosphate ((2S,4R)-1-[29-[[2-(acetylamino)-2-deoxy-beta-D-galactopyra nosyl]oxy]-14,14-bis[[3-[[3-[[5-[[2-(acetylamino)-2-deoxy-b eta-D-galactopyranosyl]oxy]-1-oxopentyl]amino]propyl]amino] -3-oxopropoxy]methyl]-1,12,19,25-tetraoxo-16-oxa-13,20,24-t riazanonacos-1-yl]-4-hydroxy-2-pyrrolidinyl)methyl ester
atgctcattgccttttcacat

SEQ ID NO: 8 - RNA, 23 nt, synthetic construct
  source 1..23: mol_type = other RNA
  modified_base 1: mod_base = OTHER; note = 2'-O-methyladenosine-3'-phosphorothioate
  modified_base 2: mod_base = OTHER; note = 2'-deoxy-2'-fluorouridine-3'-phosphorothioate
  modified_base 3: mod_base = OTHER; note = 2'-O-methylguanosine-3'-phosphate
  modified_base 4: mod_base = OTHER; note = 2'-O-methyluridine-3'-phosphate
  modified_base 5: mod_base = OTHER; note = 2'-O-methylguanosine-3'-phosphate
  modified_base 6: mod_base = OTHER; note = 2'-deoxy-2'-fluoroadenosine-3'-phosphate
  modified_base 7: mod_base = OTHER; note = 2'-O-methyladenosine-3'-phosphate
  modified_base 8: mod_base = OTHER; note = 2'-deoxy-2'-fluoroadenosine-3'-phosphate
  modified_base 9: mod_base = OTHER; note = 2'-deoxy-2'-fluoroadenosine-3'-phosphate
  modified_base 10: mod_base = OTHER; note = 2'-O-methylguanosine-3'-phosphate
  modified_base 11: mod_base = OTHER; note = 2'-O-methylguanosine-3'-phosphate
  modified_base 12: mod_base = OTHER; note = 2'-O-methylcytidine-3'-phosphate
  modified_base 13: mod_base = OTHER; note = 2'-O-methyladenosine-3'-phosphate
  modified_base 14: mod_base = OTHER; note = 2'-deoxy-2'-fluoroadenosine-3'-phosphate
  modified_base 15: mod_base = OTHER; note = 2'-O-methyluridine-3'-phosphate
  modified_base 16: mod_base = OTHER; note = 2'-deoxy-2'-fluoroguanosine-3'-phosphate
  modified_base 17: mod_base = OTHER; note = 2'-O-methyladenosine-3'-phosphate
  modified_base 18: mod_base = OTHER; note = 2'-O-methylguanosine-3'-phosphate
  modified_base 19: mod_base = OTHER; note = 2'-O-methylcytidine-3'-phosphate
  modified_base 20: mod_base = OTHER; note = 2'-O-methyladenosine-3'-phosphate
  modified_base 21: mod_base = OTHER; note = 2'-O-methyluridine-3'-phosphorothioate
  modified_base 22: mod_base = OTHER; note = 2'-O-methylguanosine-3'-phosphorothioate
  modified_base 23: mod_base = OTHER; note = 2'-O-methyluridine
atgtgaaaaggcaatgagcatgt

SEQ ID NO: 9 - RNA, 21 nt, synthetic construct
  source 1..21: mol_type = other RNA
  modified_base 1: mod_base = OTHER; note = 2'-O-methylcytidine-3'-phosphorothioate
  modified_base 2: mod_base = OTHER; note = 2'-O-methylcytidine-3'-phosphorothioate
  modified_base 3: mod_base = OTHER; note = 2'-O-methyluridine-3'-phosphate
  modified_base 4: mod_base = OTHER; note = 2'-O-methyluridine-3'-phosphate
  modified_base 5: mod_base = OTHER; note = 2'-O-methyluridine-3'-phosphate
  modified_base 6: mod_base = OTHER; note = 2'-O-methyluridine-3'-phosphate
  modified_base 7: mod_base = OTHER; note = 2'-deoxy-2'-fluorocytidine-3'-phosphate
  modified_base 8: mod_base = OTHER; note = 2'-O-methyladenosine-3'-phosphate
  modified_base 9: mod_base = OTHER; note = 2'-deoxy-2'-fluorocytidine-3'-phosphate
  modified_base 10: mod_base = OTHER; note = 2'-deoxy-2'-fluoroadenosine-3'-phosphate
  modified_base 11: mod_base = OTHER; note = 2'-deoxy-2'-fluoroguanosine-3'-phosphate
  modified_base 12: mod_base = OTHER; note = 2'-O-methyladenosine-3'-phosphate
  modified_base 13: mod_base = OTHER; note = 2'-O-methyladenosine-3'-phosphate
  modified_base 14: mod_base = OTHER; note = 2'-O-methylcytidine-3'-phosphate
  modified_base 15: mod_base = OTHER; note = 2'-O-methyluridine-3'-phosphate
  modified_base 16: mod_base = OTHER; note = 2'-O-methyluridine-3'-phosphate
  modified_base 17: mod_base = OTHER; note = 2'-O-methyluridine-3'-phosphate
  modified_base 18: mod_base = OTHER; note = 2'-O-methylcytidine-3'-phosphate
  modified_base 19: mod_base = OTHER; note = 2'-O-methyluridine-3'-phosphate
  modified_base 20: mod_base = OTHER; note = 2'-O-methylguanosine-3'-phosphate
  modified_base 21: mod_base = OTHER; note = 2'-O-methyluridine-3'-phosphate ((2S,4R)-1-[29-[[2-(acetylamino)-2-deoxy-beta-D-galactopyra nosyl]oxy]-14,14-bis[[3-[[3-[[5-[[2-(acetylamino)-2-deoxy-b eta-D-galactopyranosyl]oxy]-1-oxopentyl]amino]propyl]amino] -3-oxopropoxy]methyl]-1,12,19,25-tetraoxo-16-oxa-13,20,24-t riazanonacos-1-yl]-4-hydroxy-2-pyrrolidinyl)methyl ester
ccttttcacagaactttctgt

SEQ ID NO: 10 - RNA, 23 nt, synthetic construct
  source 1..23: mol_type = other RNA
  modified_base 1: mod_base = OTHER; note = 2'-O-methyladenosine-3'-phosphorothioate
  modified_base 2: mod_base = OTHER; note = 2'-deoxy-2'-fluorocytidine-3'-phosphorothioate
  modified_base 3: mod_base = OTHER; note = 2'-O-methyladenosine-3'-phosphate
  modified_base 4: mod_base = OTHER; note = 2'-O-methylguanosine-3'-phosphate
  modified_base 5: mod_base = OTHER; note = 2'-O-methyladenosine-3'-phosphate
  modified_base 6: mod_base = OTHER; note = 2'-deoxy-2'-fluoroadenosine-3'-phosphate
  modified_base 7: mod_base = OTHER; note = 2'-O-methyladenosine-3'-phosphate
  modified_base 8: mod_base = OTHER; note = 2'-deoxy-2'-fluoroguanosine-3'-phosphate
  modified_base 9: mod_base = OTHER; note = 2'-deoxy-2'-fluorouridine-3'-phosphate
  modified_base 10: mod_base = OTHER; note = 2'-O-methyluridine-3'-phosphate
  modified_base 11: mod_base = OTHER; note = 2'-O-methylcytidine-3'-phosphate
  modified_base 12: mod_base = OTHER; note = 2'-O-methyluridine-3'-phosphate
  modified_base 13: mod_base = OTHER; note = 2'-O-methylguanosine-3'-phosphate
  modified_base 14: mod_base = OTHER; note = 2'-deoxy-2'-fluorouridine-3'-phosphate
  modified_base 15: mod_base = OTHER; note = 2'-O-methylguanosine-3'-phosphate
  modified_base 16: mod_base = OTHER; note = 2'-deoxy-2'-fluoroadenosine-3'-phosphate
  modified_base 17: mod_base = OTHER; note = 2'-O-methyladenosine-3'-phosphate
  modified_base 18: mod_base = OTHER; note = 2'-O-methyladenosine-3'-phosphate
  modified_base 19: mod_base = OTHER; note = 2'-O-methyladenosine-3'-phosphate
  modified_base 20: mod_base = OTHER; note = 2'-O-methylguanosine-3'-phosphate
  modified_base 21: mod_base = OTHER; note = 2'-O-methylguanosine-3'-phosphorothioate
  modified_base 22: mod_base = OTHER; note = 2'-O-methylcytidine-3'-phosphorothioate
  modified_base 23: mod_base = OTHER; note = 2'-O-methyladenosine
acagaaagttctgtgaaaaggca

SEQ ID NO: 11 - RNA, 21 nt, synthetic construct
  source 1..21: mol_type = other RNA
  modified_base 1: mod_base = OTHER; note = 2'-O-methylcytidine-3'-phosphorothioate
  modified_base 2: mod_base = OTHER; note = 2'-O-methylguanosine-3'-phosphorothioate
  modified_base 3: mod_base = OTHER; note = 2'-O-methylguanosine-3'-phosphate
  modified_base 4: mod_base = OTHER; note = 2'-O-methylguanosine-3'-phosphate
  modified_base 5: mod_base = OTHER; note = 2'-O-methylcytidine-3'-phosphate
  modified_base 6: mod_base = OTHER; note = 2'-O-methyladenosine-3'-phosphate
  modified_base 7: mod_base = OTHER; note = 2'-deoxy-2'-fluorouridine-3'-phosphate
  modified_base 8: mod_base = OTHER; note = 2'-O-methyladenosine-3'-phosphate
  modified_base 9: mod_base = OTHER; note = 2'-deoxy-2'-fluoroadenosine-3'-phosphate
  modified_base 10: mod_base = OTHER; note = 2'-deoxy-2'-fluorouridine-3'-phosphate
  modified_base 11: mod_base = OTHER; note = 2'-deoxy-2'-fluoroguanosine-3'-phosphate
  modified_base 12: mod_base = OTHER; note = 2'-O-methyluridine-3'-phosphate
  modified_base 13: mod_base = OTHER; note = 2'-O-methyluridine-3'-phosphate
  modified_base 14: mod_base = OTHER; note = 2'-O-methyluridine-3'-phosphate
  modified_base 15: mod_base = OTHER; note = 2'-O-methyluridine-3'-phosphate
  modified_base 16: mod_base = OTHER; note = 2'-O-methyluridine-3'-phosphate
  modified_base 17: mod_base = OTHER; note = 2'-O-methylguanosine-3'-phosphate
  modified_base 18: mod_base = OTHER; note = 2'-O-methyladenosine-3'-phosphate
  modified_base 19: mod_base = OTHER; note = 2'-O-methylguanosine-3'-phosphate
  modified_base 20: mod_base = OTHER; note = 2'-O-methyladenosine-3'-phosphate
  modified_base 21: mod_base = OTHER; note = 2'-O-methyluridine-3'-phosphate ((2S,4R)-1-[29-[[2-(acetylamino)-2-deoxy-beta-D-galactopyra nosyl]oxy]-14,14-bis[[3-[[3-[[5-[[2-(acetylamino)-2-deoxy-b eta-D-galactopyranosyl]oxy]-1-oxopentyl]amino]propyl]amino] -3-oxopropoxy]methyl]-1,12,19,25-tetraoxo-16-oxa-13,20,24-t riazanonacos-1-yl]-4-hydroxy-2-pyrrolidinyl)methyl ester
cgggcataatgtttttgagat

SEQ ID NO: 12 - RNA, 23 nt, synthetic construct
  source 1..23: mol_type = other RNA
  modified_base 1: mod_base = OTHER; note = 2'-O-methyladenosine-3'-phosphorothioate
  modified_base 2: mod_base = OTHER; note = 2'-deoxy-2'-fluorouridine-3'-phosphorothioate
  modified_base 3: mod_base = OTHER; note = 2'-O-methylcytidine-3'-phosphate
  modified_base 4: mod_base = OTHER; note = 2'-O-methyluridine-3'-phosphate
  modified_base 5: mod_base = OTHER; note = 2'-O-methylcytidine-3'-phosphate
  modified_base 6: mod_base = OTHER; note = 2'-deoxy-2'-fluoroadenosine-3'-phosphate
  modified_base 7: mod_base = OTHER; note = 2'-O-methyladenosine-3'-phosphate
  modified_base 8: mod_base = OTHER; note = 2'-deoxy-2'-fluoroadenosine-3'-phosphate
  modified_base 9: mod_base = OTHER; note = 2'-deoxy-2'-fluoroadenosine-3'-phosphate
  modified_base 10: mod_base = OTHER; note = 2'-O-methyladenosine-3'-phosphate
  modified_base 11: mod_base = OTHER; note = 2'-O-methylcytidine-3'-phosphate
  modified_base 12: mod_base = OTHER; note = 2'-O-methyladenosine-3'-phosphate
  modified_base 13: mod_base = OTHER; note = 2'-O-methyluridine-3'-phosphate
  modified_base 14: mod_base = OTHER; note = 2'-deoxy-2'-fluorouridine-3'-phosphate
  modified_base 15: mod_base = OTHER; note = 2'-O-methyladenosine-3'-phosphate
  modified_base 16: mod_base = OTHER; note = 2'-deoxy-2'-fluorouridine-3'-phosphate
  modified_base 17: mod_base = OTHER; note = 2'-O-methylguanosine-3'-phosphate
  modified_base 18: mod_base = OTHER; note = 2'-O-methylcytidine-3'-phosphate
  modified_base 19: mod_base = OTHER; note = 2'-O-methylcytidine-3'-phosphate
  modified_base 20: mod_base = OTHER; note = 2'-O-methylcytidine-3'-phosphate
  modified_base 21: mod_base = OTHER; note = 2'-O-methylguanosine-3'-phosphorothioate
  modified_base 22: mod_base = OTHER; note = 2'-O-methyladenosine-3'-phosphorothioate
  modified_base 23: mod_base = OTHER; note = 2'-O-methylguanosine
atctcaaaaacattatgcccgag

SEQ ID NO: 13 - RNA, 21 nt, synthetic construct
  source 1..21: mol_type = other RNA
  modified_base 1: mod_base = OTHER; note = 2'-O-methyladenosine-3'-phosphorothioate
  modified_base 2: mod_base = OTHER; note = 2'-O-methyluridine-3'-phosphorothioate
  modified_base 3: mod_base = OTHER; note = 2'-O-methyladenosine-3'-phosphate
  modified_base 4: mod_base = OTHER; note = 2'-O-methyladenosine-3'-phosphate
  modified_base 5: mod_base = OTHER; note = 2'-O-methyluridine-3'-phosphate
  modified_base 6: mod_base = OTHER; note = 2'-O-methylguanosine-3'-phosphate
  modified_base 7: mod_base = OTHER; note = 2'-deoxy-2'-fluorouridine-3'-phosphate
  modified_base 8: mod_base = OTHER; note = 2'-O-methyluridine-3'-phosphate
  modified_base 9: mod_base = OTHER; note = 2'-deoxy-2'-fluorouridine-3'-phosphate
  modified_base 10: mod_base = OTHER; note = 2'-deoxy-2'-fluorouridine-3'-phosphate
  modified_base 11: mod_base = OTHER; note = 2'-deoxy-2'-fluorouridine-3'-phosphate
  modified_base 12: mod_base = OTHER; note = 2'-O-methylguanosine-3'-phosphate
  modified_base 13: mod_base = OTHER; note = 2'-O-methyladenosine-3'-phosphate
  modified_base 14: mod_base = OTHER; note = 2'-O-methylguanosine-3'-phosphate
  modified_base 15: mod_base = OTHER; note = 2'-O-methyladenosine-3'-phosphate
  modified_base 16: mod_base = OTHER; note = 2'-O-methyladenosine-3'-phosphate
  modified_base 17: mod_base = OTHER; note = 2'-O-methyluridine-3'-phosphate
  modified_base 18: mod_base = OTHER; note = 2'-O-methylguanosine-3'-phosphate
  modified_base 19: mod_base = OTHER; note = 2'-O-methyladenosine-3'-phosphate
  modified_base 20: mod_base = OTHER; note = 2'-O-methyluridine-3'-phosphate
  modified_base 21: mod_base = OTHER; note = 2'-O-methyluridine-3'-phosphate ((2S,4R)-1-[29-[[2-(acetylamino)-2-deoxy-beta-D-galactopyra nosyl]oxy]-14,14-bis[[3-[[3-[[5-[[2-(acetylamino)-2-deoxy-b eta-D-galactopyranosyl]oxy]-1-oxopentyl]amino]propyl]amino] -3-oxopropoxy]methyl]-1,12,19,25-tetraoxo-16-oxa-13,20,24-t riazanonacos-1-yl]-4-hydroxy-2-pyrrolidinyl)methyl ester
ataatgtttttgagaatgatt

SEQ ID NO: 14 - RNA, 23 nt, synthetic construct
  source 1..23: mol_type = other RNA
  modified_base 1: mod_base = OTHER; note = 2'-O-methyladenosine-3'-phosphorothioate
  modified_base 2: mod_base = OTHER; note = 2'-deoxy-2'-fluoroadenosine-3'-phosphorothioate
  modified_base 3: mod_base = OTHER; note = 2'-O-methyluridine-3'-phosphate
  modified_base 4: mod_base = OTHER; note = 2'-O-methylcytidine-3'-phosphate
  modified_base 5: mod_base = OTHER; note = 2'-O-methyladenosine-3'-phosphate
  modified_base 6: mod_base = OTHER; note = 2'-deoxy-2'-fluorouridine-3'-phosphate
  modified_base 7: mod_base = OTHER; note = 2'-O-methyluridine-3'-phosphate
  modified_base 8: mod_base = OTHER; note = 2'-deoxy-2'-fluorocytidine-3'-phosphate
  modified_base 9: mod_base = OTHER; note = 2'-deoxy-2'-fluorouridine-3'-phosphate
  modified_base 10: mod_base = OTHER; note = 2'-O-methylcytidine-3'-phosphate
  modified_base 11: mod_base = OTHER; note = 2'-O-methyladenosine-3'-phosphate
  modified_base 12: mod_base = OTHER; note = 2'-O-methyladenosine-3'-phosphate
  modified_base 13: mod_base = OTHER; note = 2'-O-methyladenosine-3'-phosphate
  modified_base 14: mod_base = OTHER; note = 2'-deoxy-2'-fluoroadenosine-3'-phosphate
  modified_base 15: mod_base = OTHER; note = 2'-O-methyladenosine-3'-phosphate
  modified_base 16: mod_base = OTHER; note = 2'-deoxy-2'-fluorocytidine-3'-phosphate
  modified_base 17: mod_base = OTHER; note = 2'-O-methyladenosine-3'-phosphate
  modified_base 18: mod_base = OTHER; note = 2'-O-methyluridine-3'-phosphate
  modified_base 19: mod_base = OTHER; note = 2'-O-methyluridine-3'-phosphate
  modified_base 20: mod_base = OTHER; note = 2'-O-methyladenosine-3'-phosphate
  modified_base 21: mod_base = OTHER; note = 2'-O-methyluridine-3'-phosphorothioate
  modified_base 22: mod_base = OTHER; note = 2'-O-methylguanosine-3'-phosphorothioate
  modified_base 23: mod_base = OTHER; note = 2'-O-methylcytidine
aatcattctcaaaaacattatgc

SEQ ID NO: 15 - RNA, 21 nt, synthetic construct
  source 1..21: mol_type = other RNA
  modified_base 1: mod_base = OTHER; note = 2'-O-methyladenosine-3'-phosphorothioate
  modified_base 2: mod_base = OTHER; note = 2'-O-methyladenosine-3'-phosphorothioate
  modified_base 3: mod_base = OTHER; note = 2'-O-methylcytidine-3'-phosphate
  modified_base 4: mod_base = OTHER; note = 2'-O-methyladenosine-3'-phosphate
  modified_base 5: mod_base = OTHER; note = 2'-O-methyluridine-3'-phosphate
  modified_base 6: mod_base = OTHER; note = 2'-O-methylguanosine-3'-phosphate
  modified_base 7: mod_base = OTHER; note = 2'-deoxy-2'-fluorocytidine-3'-phosphate
  modified_base 8: mod_base = OTHER; note = 2'-O-methyluridine-3'-phosphate
  modified_base 9: mod_base = OTHER; note = 2'-deoxy-2'-fluorocytidine-3'-phosphate
  modified_base 10: mod_base = OTHER; note = 2'-deoxy-2'-fluoroadenosine-3'-phosphate
  modified_base 11: mod_base = OTHER; note = 2'-deoxy-2'-fluorouridine-3'-phosphate
  modified_base 12: mod_base = OTHER; note = 2'-O-methyluridine-3'-phosphate
  modified_base 13: mod_base = OTHER; note = 2'-O-methylguanosine-3'-phosphate
  modified_base 14: mod_base = OTHER; note = 2'-O-methylcytidine-3'-phosphate
  modified_base 15: mod_base = OTHER; note = 2'-O-methylcytidine-3'-phosphate
  modified_base 16: mod_base = OTHER; note = 2'-O-methyluridine-3'-phosphate
  modified_base 17: mod_base = OTHER; note = 2'-O-methyluridine-3'-phosphate
  modified_base 18: mod_base = OTHER; note = 2'-O-methyluridine-3'-phosphate
  modified_base 19: mod_base = OTHER; note = 2'-O-methyluridine-3'-phosphate
  modified_base 20: mod_base = OTHER; note = 2'-O-methylcytidine-3'-phosphate
  modified_base 21: mod_base = OTHER; note = 2'-O-methyluridine-3'-phosphate ((2S,4R)-1-[29-[[2-(acetylamino)-2-deoxy-beta-D-galactopyra nosyl]oxy]-14,14-bis[[3-[[3-[[5-[[2-(acetylamino)-2-deoxy-b eta-D-galactopyranosyl]oxy]-1-oxopentyl]amino]propyl]amino] -3-oxopropoxy]methyl]-1,12,19,25-tetraoxo-16-oxa-13,20,24-t riazanonacos-1-yl]-4-hydroxy-2-pyrrolidinyl)methyl ester
aacatgctcattgccttttct

SEQ ID NO: 16 - RNA, 23 nt, synthetic construct
  source 1..23: mol_type = other RNA
  modified_base 1: mod_base = OTHER; note = 2'-O-methyladenosine-3'-phosphorothioate
  modified_base 2: mod_base = OTHER; note = 2'-deoxy-2'-fluoroguanosine-3'-phosphorothioate
  modified_base 3: mod_base = OTHER; note = 2'-O-methyladenosine-3'-phosphate
  modified_base 4: mod_base = OTHER; note = 2'-O-methyladenosine-3'-phosphate
  modified_base 5: mod_base = OTHER; note = 2'-O-methyladenosine-3'-phosphate
  modified_base 6: mod_base = OTHER; note = 2'-deoxy-2'-fluoroadenosine-3'-phosphate
  modified_base 7: mod_base = OTHER; note = 2'-O-methylguanosine-3'-phosphate
  modified_base 8: mod_base = OTHER; note = 2'-deoxy-2'-fluoroguanosine-3'-phosphate
  modified_base 9: mod_base = OTHER; note = 2'-deoxy-2'-fluorocytidine-3'-phosphate
  modified_base 10: mod_base = OTHER; note = 2'-O-methyladenosine-3'-phosphate
  modified_base 11: mod_base = OTHER; note = 2'-O-methyladenosine-3'-phosphate
  modified_base 12: mod_base = OTHER; note = 2'-O-methyluridine-3'-phosphate
  modified_base 13: mod_base = OTHER; note = 2'-O-methylguanosine-3'-phosphate
  modified_base 14: mod_base = OTHER; note = 2'-deoxy-2'-fluoroadenosine-3'-phosphate
  modified_base 15: mod_base = OTHER; note = 2'-O-methylguanosine-3'-phosphate
  modified_base 16: mod_base = OTHER; note = 2'-deoxy-2'-fluorocytidine-3'-phosphate
  modified_base 17: mod_base = OTHER; note = 2'-O-methyladenosine-3'-phosphate
  modified_base 18: mod_base = OTHER; note = 2'-O-methyluridine-3'-phosphate
  modified_base 19: mod_base = OTHER; note = 2'-O-methylguanosine-3'-phosphate
  modified_base 20: mod_base = OTHER; note = 2'-O-methyluridine-3'-phosphate
  modified_base 21: mod_base = OTHER; note = 2'-O-methyluridine-3'-phosphorothioate
  modified_base 22: mod_base = OTHER; note = 2'-O-methylcytidine-3'-phosphorothioate
  modified_base 23: mod_base = OTHER; note = 2'-O-methyluridine
agaaaaggcaatgagcatgttct

SEQ ID NO: 17 - RNA, 21 nt, synthetic construct
  source 1..21: mol_type = other RNA
  modified_base 1: mod_base = OTHER; note = 2'-O-methyluridine-3'-phosphorothioate
  modified_base 2: mod_base = OTHER; note = 2'-O-methyluridine-3'-phosphorothioate
  modified_base 3: mod_base = OTHER; note = 2'-O-methylguanosine-3'-phosphate
  modified_base 4: mod_base = OTHER; note = 2'-O-methylcytidine-3'-phosphate
  modified_base 5: mod_base = OTHER; note = 2'-O-methylcytidine-3'-phosphate
  modified_base 6: mod_base = OTHER; note = 2'-O-methyluridine-3'-phosphate
  modified_base 7: mod_base = OTHER; note = 2'-deoxy-2'-fluorouridine-3'-phosphate
  modified_base 8: mod_base = OTHER; note = 2'-O-methyluridine-3'-phosphate
  modified_base 9: mod_base = OTHER; note = 2'-deoxy-2'-fluorouridine-3'-phosphate
  modified_base 10: mod_base = OTHER; note = 2'-deoxy-2'-fluorocytidine-3'-phosphate
  modified_base 11: mod_base = OTHER; note = 2'-deoxy-2'-fluoroadenosine-3'-phosphate
  modified_base 12: mod_base = OTHER; note = 2'-O-methylcytidine-3'-phosphate
  modified_base 13: mod_base = OTHER; note = 2'-O-methyladenosine-3'-phosphate
  modified_base 14: mod_base = OTHER; note = 2'-O-methylguanosine-3'-phosphate
  modified_base 15: mod_base = OTHER; note = 2'-O-methyladenosine-3'-phosphate
  modified_base 16: mod_base = OTHER; note = 2'-O-methyladenosine-3'-phosphate
  modified_base 17: mod_base = OTHER; note = 2'-O-methylcytidine-3'-phosphate
  modified_base 18: mod_base = OTHER; note = 2'-O-methyluridine-3'-phosphate
  modified_base 19: mod_base = OTHER; note = 2'-O-methyluridine-3'-phosphate
  modified_base 20: mod_base = OTHER; note = 2'-O-methyluridine-3'-phosphate
  modified_base 21: mod_base = OTHER; note = 2'-O-methyluridine-3'-phosphate ((2S,4R)-1-[29-[[2-(acetylamino)-2-deoxy-beta-D-galactopyra nosyl]oxy]-14,14-bis[[3-[[3-[[5-[[2-(acetylamino)-2-deoxy-b eta-D-galactopyranosyl]oxy]-1-oxopentyl]amino]propyl]amino] -3-oxopropoxy]methyl]-1,12,19,25-tetraoxo-16-oxa-13,20,24-t riazanonacos-1-yl]-4-hydroxy-2-pyrrolidinyl)methyl ester
ttgccttttcacagaactttt

SEQ ID NO: 18 - RNA, 23 nt, synthetic construct
  source 1..23: mol_type = other RNA
  modified_base 1: mod_base = OTHER; note = 2'-O-methyladenosine-3'-phosphorothioate
  modified_base 2: mod_base = OTHER; note = 2'-deoxy-2'-fluoroadenosine-3'-phosphorothioate
  modified_base 3: mod_base = OTHER; note = 2'-O-methyladenosine-3'-phosphate
  modified_base 4: mod_base = OTHER; note = 2'-O-methyladenosine-3'-phosphate
  modified_base 5: mod_base = OTHER; note = 2'-O-methylguanosine-3'-phosphate
  modified_base 6: mod_base = OTHER; note = 2'-deoxy-2'-fluorouridine-3'-phosphate
  modified_base 7: mod_base = OTHER; note = 2'-O-methyluridine-3'-phosphate
  modified_base 8: mod_base = OTHER; note = 2'-deoxy-2'-fluorocytidine-3'-phosphate
  modified_base 9: mod_base = OTHER; note = 2'-deoxy-2'-fluorouridine-3'-phosphate
  modified_base 10: mod_base = OTHER; note = 2'-O-methylguanosine-3'-phosphate
  modified_base 11: mod_base = OTHER; note = 2'-O-methyluridine-3'-phosphate
  modified_base 12: mod_base = OTHER; note = 2'-O-methylguanosine-3'-phosphate
  modified_base 13: mod_base = OTHER; note = 2'-O-methyladenosine-3'-phosphate
  modified_base 14: mod_base = OTHER; note = 2'-deoxy-2'-fluoroadenosine-3'-phosphate
  modified_base 15: mod_base = OTHER; note = 2'-O-methyladenosine-3'-phosphate
  modified_base 16: mod_base = OTHER; note = 2'-deoxy-2'-fluoroadenosine-3'-phosphate
  modified_base 17: mod_base = OTHER; note = 2'-O-methylguanosine-3'-phosphate
  modified_base 18: mod_base = OTHER; note = 2'-O-methylguanosine-3'-phosphate
  modified_base 19: mod_base = OTHER; note = 2'-O-methylcytidine-3'-phosphate
  modified_base 20: mod_base = OTHER; note = 2'-O-methyladenosine-3'-phosphate
  modified_base 21: mod_base = OTHER; note = 2'-O-methyladenosine-3'-phosphorothioate
  modified_base 22: mod_base = OTHER; note = 2'-O-methyluridine-3'-phosphorothioate
  modified_base 23: mod_base = OTHER; note = 2'-O-methylguanosine
aaaagttctgtgaaaaggcaatg

SEQ ID NO: 19 - RNA, 21 nt, synthetic construct
  source 1..21: mol_type = other RNA
  modified_base 1: mod_base = OTHER; note = 2'-O-methylcytidine-3'-phosphorothioate
  modified_base 2: mod_base = OTHER; note = 2'-O-methyluridine-3'-phosphorothioate
  modified_base 3: mod_base = OTHER; note = 2'-O-methyluridine-3'-phosphate
  modified_base 4: mod_base = OTHER; note = 2'-O-methyluridine-3'-phosphate
  modified_base 5: mod_base = OTHER; note = 2'-O-methyluridine-3'-phosphate
  modified_base 6: mod_base = OTHER; note = 2'-O-methylcytidine-3'-phosphate
  modified_base 7: mod_base = OTHER; note = 2'-deoxy-2'-fluoroadenosine-3'-phosphate
  modified_base 8: mod_base = OTHER; note = 2'-O-methylcytidine-3'-phosphate
  modified_base 9: mod_base = OTHER; note = 2'-deoxy-2'-fluoroadenosine-3'-phosphate
  modified_base 10: mod_base = OTHER; note = 2'-deoxy-2'-fluoroguanosine-3'-phosphate
  modified_base 11: mod_base = OTHER; note = 2'-deoxy-2'-fluoroadenosine-3'-phosphate
  modified_base 12: mod_base = OTHER; note = 2'-O-methyladenosine-3'-phosphate
  modified_base 13: mod_base = OTHER; note = 2'-O-methylcytidine-3'-phosphate
  modified_base 14: mod_base = OTHER; note = 2'-O-methyluridine-3'-phosphate
  modified_base 15: mod_base = OTHER; note = 2'-O-methyluridine-3'-phosphate
  modified_base 16: mod_base = OTHER; note = 2'-O-methyluridine-3'-phosphate
  modified_base 17: mod_base = OTHER; note = 2'-O-methylcytidine-3'-phosphate
  modified_base 18: mod_base = OTHER; note = 2'-O-methyluridine-3'-phosphate
  modified_base 19: mod_base = OTHER; note = 2'-O-methylguanosine-3'-phosphate
  modified_base 20: mod_base = OTHER; note = 2'-O-methyluridine-3'-phosphate
  modified_base 21: mod_base = OTHER; note = 2'-O-methyluridine-3'-phosphate ((2S,4R)-1-[29-[[2-(acetylamino)-2-deoxy-beta-D-galactopyra nosyl]oxy]-14,14-bis[[3-[[3-[[5-[[2-(acetylamino)-2-deoxy-b eta-D-galactopyranosyl]oxy]-1-oxopentyl]amino]propyl]amino] -3-oxopropoxy]methyl]-1,12,19,25-tetraoxo-16-oxa-13,20,24-t riazanonacos-1-yl]-4-hydroxy-2-pyrrolidinyl)methyl ester
cttttcacagaactttctgtt

SEQ ID NO: 20 - RNA, 23 nt, synthetic construct
  source 1..23: mol_type = other RNA
  modified_base 1: mod_base = OTHER; note = 2'-O-methyladenosine-3'-phosphorothioate
  modified_base 2: mod_base = OTHER; note = 2'-deoxy-2'-fluoroadenosine-3'-phosphorothioate
  modified_base 3: mod_base = OTHER; note = 2'-O-methylcytidine-3'-phosphate
  modified_base 4: mod_base = OTHER; note = 2'-O-methyladenosine-3'-phosphate
  modified_base 5: mod_base = OTHER; note = 2'-O-methylguanosine-3'-phosphate
  modified_base 6: mod_base = OTHER; note = 2'-deoxy-2'-fluoroadenosine-3'-phosphate
  modified_base 7: mod_base = OTHER; note = 2'-O-methyladenosine-3'-phosphate
  modified_base 8: mod_base = OTHER; note = 2'-deoxy-2'-fluoroadenosine-3'-phosphate
  modified_base 9: mod_base = OTHER; note = 2'-deoxy-2'-fluoroguanosine-3'-phosphate
  modified_base 10: mod_base = OTHER; note = 2'-O-methyluridine-3'-phosphate
  modified_base 11: mod_base = OTHER; note = 2'-O-methyluridine-3'-phosphate
  modified_base 12: mod_base = OTHER; note = 2'-O-methylcytidine-3'-phosphate
  modified_base 13: mod_base = OTHER; note = 2'-O-methyluridine-3'-phosphate
  modified_base 14: mod_base = OTHER; note = 2'-deoxy-2'-fluoroguanosine-3'-phosphate
  modified_base 15: mod_base = OTHER; note = 2'-O-methyluridine-3'-phosphate
  modified_base 16: mod_base = OTHER; note = 2'-deoxy-2'-fluoroguanosine-3'-phosphate
  modified_base 17: mod_base = OTHER; note = 2'-O-methyladenosine-3'-phosphate
  modified_base 18: mod_base = OTHER; note = 2'-O-methyladenosine-3'-phosphate
  modified_base 19: mod_base = OTHER; note = 2'-O-methyladenosine-3'-phosphate
  modified_base 20: mod_base = OTHER; note = 2'-O-methyladenosine-3'-phosphate
  modified_base 21: mod_base = OTHER; note = 2'-O-methylguanosine-3'-phosphorothioate
  modified_base 22: mod_base = OTHER; note = 2'-O-methylguanosine-3'-phosphorothioate
  modified_base 23: mod_base = OTHER; note = 2'-O-methylcytidine
aacagaaagttctgtgaaaaggc

SEQ ID NO: 21 - RNA, 21 nt, synthetic construct
  source 1..21: mol_type = other RNA
  modified_base 1: mod_base = OTHER; note = 2'-O-methyladenosine-3'-phosphorothioate
  modified_base 2: mod_base = OTHER; note = 2'-O-methyladenosine-3'-phosphorothioate
  modified_base 3: mod_base = OTHER; note = 2'-O-methylguanosine-3'-phosphate
  modified_base 4: mod_base = OTHER; note = 2'-O-methyluridine-3'-phosphate
  modified_base 5: mod_base = OTHER; note = 2'-O-methylguanosine-3'-phosphate
  modified_base 6: mod_base = OTHER; note = 2'-O-methyladenosine-3'-phosphate
  modified_base 7: mod_base = OTHER; note = 2'-deoxy-2'-fluorocytidine-3'-phosphate
  modified_base 8: mod_base = OTHER; note = 2'-O-methyluridine-3'-phosphate
  modified_base 9: mod_base = OTHER; note = 2'-deoxy-2'-fluorouridine-3'-phosphate
  modified_base 10: mod_base = OTHER; note = 2'-deoxy-2'-fluorouridine-3'-phosphate
  modified_base 11: mod_base = OTHER; note = 2'-deoxy-2'-fluoroguanosine-3'-phosphate
  modified_base 12: mod_base = OTHER; note = 2'-O-methyluridine-3'-phosphate
  modified_base 13: mod_base = OTHER; note = 2'-O-methylguanosine-3'-phosphate
  modified_base 14: mod_base = OTHER; note = 2'-O-methyladenosine-3'-phosphate
  modified_base 15: mod_base = OTHER; note = 2'-O-methyladenosine-3'-phosphate
  modified_base 16: mod_base = OTHER; note = 2'-O-methylguanosine-3'-phosphate
  modified_base 17: mod_base = OTHER; note = 2'-O-methylguanosine-3'-phosphate
  modified_base 18: mod_base = OTHER; note = 2'-O-methyladenosine-3'-phosphate
  modified_base 19: mod_base = OTHER; note = 2'-O-methyluridine-3'-phosphate
  modified_base 20: mod_base = OTHER; note = 2'-O-methyluridine-3'-phosphate
  modified_base 21: mod_base = OTHER; note = 2'-O-methyluridine-3'-phosphate ((2S,4R)-1-[29-[[2-(acetylamino)-2-deoxy-beta-D-galactopyra nosyl]oxy]-14,14-bis[[3-[[3-[[5-[[2-(acetylamino)-2-deoxy-b eta-D-galactopyranosyl]oxy]-1-oxopentyl]amino]propyl]amino] -3-oxopropoxy]methyl]-1,12,19,25-tetraoxo-16-oxa-13,20,24-t riazanonacos-1-yl]-4-hydroxy-2-pyrrolidinyl)methyl ester
aagtgactttgtgaaggattt

SEQ ID NO: 22 - RNA, 23 nt, synthetic construct
  source 1..23: mol_type = other RNA
  modified_base 1: mod_base = OTHER; note = 2'-O-methyladenosine-3'-phosphorothioate
  modified_base 2: mod_base = OTHER; note = 2'-deoxy-2'-fluoroadenosine-3'-phosphorothioate
  modified_base 3: mod_base = OTHER; note = 2'-O-methyladenosine-3'-phosphate
  modified_base 4: mod_base = OTHER; note = 2'-O-methyluridine-3'-phosphate
  modified_base 5: mod_base = OTHER; note = 2'-O-methylcytidine-3'-phosphate
  modified_base 6: mod_base = OTHER; note = 2'-deoxy-2'-fluorocytidine-3'-phosphate
  modified_base 7: mod_base = OTHER; note = 2'-O-methyluridine-3'-phosphate
  modified_base 8: mod_base = OTHER; note = 2'-deoxy-2'-fluorouridine-3'-phosphate
  modified_base 9: mod_base = OTHER; note = 2'-deoxy-2'-fluorocytidine-3'-phosphate
  modified_base 10: mod_base = OTHER; note = 2'-O-methyladenosine-3'-phosphate
  modified_base 11: mod_base = OTHER; note = 2'-O-methylcytidine-3'-phosphate
  modified_base 12: mod_base = OTHER; note = 2'-O-methyladenosine-3'-phosphate
  modified_base 13: mod_base = OTHER; note = 2'-O-methyladenosine-3'-phosphate
  modified_base 14: mod_base = OTHER; note = 2'-deoxy-2'-fluoroadenosine-3'-phosphate
  modified_base 15: mod_base = OTHER; note = 2'-O-methylguanosine-3'-phosphate
  modified_base 16: mod_base = OTHER; note = 2'-deoxy-2'-fluorouridine-3'-phosphate
  modified_base 17: mod_base = OTHER; note = 2'-O-methylcytidine-3'-phosphate
  modified_base 18: mod_base = OTHER; note = 2'-O-methyladenosine-3'-phosphate
  modified_base 19: mod_base = OTHER; note = 2'-O-methylcytidine-3'-phosphate
  modified_base 20: mod_base = OTHER; note = 2'-O-methyluridine-3'-phosphate
  modified_base 21: mod_base = OTHER; note = 2'-O-methyluridine-3'-phosphorothioate
  modified_base 22: mod_base = OTHER; note = 2'-O-methylcytidine-3'-phosphorothioate
  modified_base 23: mod_base = OTHER; note = 2'-O-methyluridine
aaatccttcacaaagtcacttct

SEQ ID NO: 23 - RNA, 21 nt, synthetic construct
  source 1..21: mol_type = other RNA
  modified_base 1: mod_base = OTHER; note = 2'-O-methyladenosine-3'-phosphorothioate
  modified_base 2: mod_base = OTHER; note = 2'-O-methylguanosine-3'-phosphorothioate
  modified_base 3: mod_base = OTHER; note = 2'-O-methylcytidine-3'-phosphate
  modified_base 4: mod_base = OTHER; note = 2'-O-methyladenosine-3'-phosphate
  modified_base 5: mod_base = OTHER; note = 2'-O-methyluridine-3'-phosphate
  modified_base 6: mod_base = OTHER; note = 2'-O-methyluridine-3'-phosphate
  modified_base 7: mod_base = OTHER; note = 2'-deoxy-2'-fluorouridine-3'-phosphate
  modified_base 8: mod_base = OTHER; note = 2'-O-methyluridine-3'-phosphate
  modified_base 9: mod_base = OTHER; note = 2'-deoxy-2'-fluoroadenosine-3'-phosphate
  modified_base 10: mod_base = OTHER; note = 2'-deoxy-2'-fluorocytidine-3'-phosphate
  modified_base 11: mod_base = OTHER; note = 2'-deoxy-2'-fluoroadenosine-3'-phosphate
  modified_base 12: mod_base = OTHER; note = 2'-O-methylcytidine-3'-phosphate
  modified_base 13: mod_base = OTHER; note = 2'-O-methylcytidine-3'-phosphate
  modified_base 14: mod_base = OTHER; note = 2'-O-methyluridine-3'-phosphate
  modified_base 15: mod_base = OTHER; note = 2'-O-methyluridine-3'-phosphate
  modified_base 16: mod_base = OTHER; note = 2'-O-methylguanosine-3'-phosphate
  modified_base 17: mod_base = OTHER; note = 2'-O-methyladenosine-3'-phosphate
  modified_base 18: mod_base = OTHER; note = 2'-O-methyladenosine-3'-phosphate
  modified_base 19: mod_base = OTHER; note = 2'-O-methylguanosine-3'-phosphate
  modified_base 20: mod_base = OTHER; note = 2'-O-methyladenosine-3'-phosphate
  modified_base 21: mod_base = OTHER; note = 2'-O-methyluridine-3'-phosphate ((2S,4R)-1-[29-[[2-(acetylamino)-2-deoxy-beta-D-galactopyra nosyl]oxy]-14,14-bis[[3-[[3-[[5-[[2-(acetylamino)-2-deoxy-b eta-D-galactopyranosyl]oxy]-1-oxopentyl]amino]propyl]amino] -3-oxopropoxy]methyl]-1,12,19,25-tetraoxo-16-oxa-13,20,24-t riazanonacos-1-yl]-4-hydroxy-2-pyrrolidinyl)methyl ester
agcattttacaccttgaagat

SEQ ID NO: 24 - RNA, 23 nt, synthetic construct
  source 1..23: mol_type = other RNA
  modified_base 1: mod_base = OTHER; note = 2'-O-methyladenosine-3'-phosphorothioate
  modified_base 2: mod_base = OTHER; note = 2'-deoxy-2'-fluorouridine-3'-phosphorothioate
  modified_base 3: mod_base = OTHER; note = 2'-O-methylcytidine-3'-phosphate
  modified_base 4: mod_base = OTHER; note = 2'-O-methyluridine-3'-phosphate
  modified_base 5: mod_base = OTHER; note = 2'-O-methyluridine-3'-phosphate
  modified_base 6: mod_base = OTHER; note = 2'-deoxy-2'-fluorocytidine-3'-phosphate
  modified_base 7: mod_base = OTHER; note = 2'-O-methyladenosine-3'-phosphate
  modified_base 8: mod_base = OTHER; note = 2'-deoxy-2'-fluoroadenosine-3'-phosphate
  modified_base 9: mod_base = OTHER; note = 2'-deoxy-2'-fluoroguanosine-3'-phosphate
  modified_base 10: mod_base = OTHER; note = 2'-O-methylguanosine-3'-phosphate
  modified_base 11: mod_base = OTHER; note = 2'-O-methyluridine-3'-phosphate
  modified_base 12: mod_base = OTHER; note = 2'-O-methylguanosine-3'-phosphate
  modified_base 13: mod_base = OTHER; note = 2'-O-methyluridine-3'-phosphate
  modified_base 14: mod_base = OTHER; note = 2'-deoxy-2'-fluoroadenosine-3'-phosphate
  modified_base 15: mod_base = OTHER; note = 2'-O-methyladenosine-3'-phosphate
  modified_base 16: mod_base = OTHER; note = 2'-deoxy-2'-fluoroadenosine-3'-phosphate
  modified_base 17: mod_base = OTHER; note = 2'-O-methyladenosine-3'-phosphate
  modified_base 18: mod_base = OTHER; note = 2'-O-methyluridine-3'-phosphate
  modified_base 19: mod_base = OTHER; note = 2'-O-methylguanosine-3'-phosphate
  modified_base 20: mod_base = OTHER; note = 2'-O-methylcytidine-3'-phosphate
  modified_base 21: mod_base = OTHER; note = 2'-O-methyluridine-3'-phosphorothioate
  modified_base 22: mod_base = OTHER; note = 2'-O-methylcytidine-3'-phosphorothioate
  modified_base 23: mod_base = OTHER; note = 2'-O-methylcytidine
atcttcaaggtgtaaaatgctcc

SEQ ID NO: 25 - RNA, 21 nt, synthetic construct
  source 1..21: mol_type = other RNA
  modified_base 1: mod_base = OTHER; note = 2'-O-methyluridine-3'-phosphorothioate
  modified_base 2: mod_base = OTHER; note = 2'-O-methylguanosine-3'-phosphorothioate
  modified_base 3: mod_base = OTHER; note = 2'-O-methyluridine-3'-phosphate
  modified_base 4: mod_base = OTHER; note = 2'-O-methylguanosine-3'-phosphate
  modified_base 5: mod_base = OTHER; note = 2'-O-methyladenosine-3'-phosphate
  modified_base 6: mod_base = OTHER; note = 2'-O-methyladenosine-3'-phosphate
  modified_base 7: mod_base = OTHER; note = 2'-deoxy-2'-fluoroadenosine-3'-phosphate
  modified_base 8: mod_base = OTHER; note = 2'-O-methylguanosine-3'-phosphate
  modified_base 9: mod_base = OTHER; note = 2'-deoxy-2'-fluoroadenosine-3'-phosphate
  modified_base 10: mod_base = OTHER; note = 2'-deoxy-2'-fluoroguanosine-3'-phosphate
  modified_base 11: mod_base = OTHER; note = 2'-deoxy-2'-fluorouridine-3'-phosphate
  modified_base 12: mod_base = OTHER; note = 2'-O-methylcytidine-3'-phosphate
  modified_base 13: mod_base = OTHER; note = 2'-O-methyluridine-3'-phosphate
  modified_base 14: mod_base = OTHER; note = 2'-O-methyluridine-3'-phosphate
  modified_base 15: mod_base = OTHER; note = 2'-O-methyluridine-3'-phosphate
  modified_base 16: mod_base = OTHER; note = 2'-O-methyluridine-3'-phosphate
  modified_base 17: mod_base = OTHER; note = 2'-O-methylguanosine-3'-phosphate
  modified_base 18: mod_base = OTHER; note = 2'-O-methyluridine-3'-phosphate
  modified_base 19: mod_base = OTHER; note = 2'-O-methyluridine-3'-phosphate
  modified_base 20: mod_base = OTHER; note = 2'-O-methyladenosine-3'-phosphate
  modified_base 21: mod_base = OTHER; note = 2'-O-methyluridine-3'-phosphate ((2S,4R)-1-[29-[[2-(acetylamino)-2-deoxy-beta-D-galactopyra nosyl]oxy]-14,14-bis[[3-[[3-[[5-[[2-(acetylamino)-2-deoxy-b eta-D-galactopyranosyl]oxy]-1-oxopentyl]amino]propyl]amino] -3-oxopropoxy]methyl]-1,12,19,25-tetraoxo-16-oxa-13,20,24-t riazanonacos-1-yl]-4-hydroxy-2-pyrrolidinyl)methyl ester
tgtgaaagagtcttttgttat

SEQ ID NO: 26 - RNA, 23 nt, synthetic construct
  source 1..23: mol_type = other RNA
  modified_base 1: mod_base = OTHER; note = 2'-O-methyladenosine-3'-phosphorothioate
  modified_base 2: mod_base = OTHER; note = 2'-deoxy-2'-fluorouridine-3'-phosphorothioate
  modified_base 3: mod_base = OTHER; note = 2'-O-methyladenosine-3'-phosphate
  modified_base 4: mod_base = OTHER; note = 2'-O-methyladenosine-3'-phosphate
  modified_base 5: mod_base = OTHER; note = 2'-O-methylcytidine-3'-phosphate
  modified_base 6: mod_base = OTHER; note = 2'-deoxy-2'-fluoroadenosine-3'-phosphate
  modified_base 7: mod_base = OTHER; note = 2'-O-methyladenosine-3'-phosphate
  modified_base 8: mod_base = OTHER; note = 2'-deoxy-2'-fluoroadenosine-3'-phosphate
  modified_base 9: mod_base = OTHER; note = 2'-deoxy-2'-fluoroadenosine-3'-phosphate
  modified_base 10: mod_base = OTHER; note = 2'-O-methylguanosine-3'-phosphate
  modified_base 11: mod_base = OTHER; note = 2'-O-methyladenosine-3'-phosphate
  modified_base 12: mod_base = OTHER; note = 2'-O-methylcytidine-3'-phosphate
  modified_base 13: mod_base = OTHER; note = 2'-O-methyluridine-3'-phosphate
  modified_base 14: mod_base = OTHER; note = 2'-deoxy-2'-fluorocytidine-3'-phosphate
  modified_base 15: mod_base = OTHER; note = 2'-O-methyluridine-3'-phosphate
  modified_base 16: mod_base = OTHER; note = 2'-deoxy-2'-fluorouridine-3'-phosphate
  modified_base 17: mod_base = OTHER; note = 2'-O-methyluridine-3'-phosphate
  modified_base 18: mod_base = OTHER; note = 2'-O-methylcytidine-3'-phosphate
  modified_base 19: mod_base = OTHER; note = 2'-O-methyladenosine-3'-phosphate
  modified_base 20: mod_base = OTHER; note = 2'-O-methylcytidine-3'-phosphate
  modified_base 21: mod_base = OTHER; note = 2'-O-methyladenosine-3'-phosphorothioate
  modified_base 22: mod_base = OTHER; note = 2'-O-methyluridine-3'-phosphorothioate
  modified_base 23: mod_base = OTHER; note = 2'-O-methylcytidine
ataacaaaagactctttcacatc

SEQ ID NO: 27 - RNA, 21 nt, synthetic construct
  source 1..21: mol_type = other RNA
  modified_base 1: mod_base = OTHER; note = 2'-O-methyladenosine-3'-phosphorothioate
  modified_base 2: mod_base = OTHER; note = 2'-O-methylcytidine-3'-phosphorothioate
  modified_base 3: mod_base = OTHER; note = 2'-O-methyluridine-3'-phosphate
  modified_base 4: mod_base = OTHER; note = 2'-O-methylcytidine-3'-phosphate
  modified_base 5: mod_base = OTHER; note = 2'-O-methyluridine-3'-phosphate
  modified_base 6: mod_base = OTHER; note = 2'-O-methylguanosine-3'-phosphate
  modified_base 7: mod_base = OTHER; note = 2'-deoxy-2'-fluorocytidine-3'-phosphate
  modified_base 8: mod_base = OTHER; note = 2'-O-methyluridine-3'-phosphate
  modified_base 9: mod_base = OTHER; note = 2'-deoxy-2'-fluoroadenosine-3'-phosphate
  modified_base 10: mod_base = OTHER; note = 2'-deoxy-2'-fluorouridine-3'-phosphate
  modified_base 11: mod_base = OTHER; note = 2'-deoxy-2'-fluoroguanosine-3'-phosphate
  modified_base 12: mod_base = OTHER; note = 2'-O-methylcytidine-3'-phosphate
  modified_base 13: mod_base = OTHER; note = 2'-O-methyluridine-3'-phosphate
  modified_base 14: mod_base = OTHER; note = 2'-O-methyluridine-3'-phosphate
  modified_base 15: mod_base = OTHER; note = 2'-O-methyluridine-3'-phosphate
  modified_base 16: mod_base = OTHER; note = 2'-O-methyluridine-3'-phosphate
  modified_base 17: mod_base = OTHER; note = 2'-O-methylguanosine-3'-phosphate
  modified_base 18: mod_base = OTHER; note = 2'-O-methyluridine-3'-phosphate
  modified_base 19: mod_base = OTHER; note = 2'-O-methylcytidine-3'-phosphate
  modified_base 20: mod_base = OTHER; note = 2'-O-methyluridine-3'-phosphate
  modified_base 21: mod_base = OTHER; note = 2'-O-methyluridine-3'-phosphate ((2S,4R)-1-[29-[[2-(acetylamino)-2-deoxy-beta-D-galactopyra nosyl]oxy]-14,14-bis[[3-[[3-[[5-[[2-(acetylamino)-2-deoxy-b eta-D-galactopyranosyl]oxy]-1-oxopentyl]amino]propyl]amino] -3-oxopropoxy]methyl]-1,12,19,25-tetraoxo-16-oxa-13,20,24-t riazanonacos-1-yl]-4-hydroxy-2-pyrrolidinyl)methyl ester
actctgctatgcttttgtctt

SEQ ID NO: 28 - RNA, 23 nt, synthetic construct
  source 1..23: mol_type = other RNA
  modified_base 1: mod_base = OTHER; note = 2'-O-methyladenosine-3'-phosphorothioate
  modified_base 2: mod_base = OTHER; note = 2'-deoxy-2'-fluoroadenosine-3'-phosphorothioate
  modified_base 3: mod_base = OTHER; note = 2'-O-methylguanosine-3'-phosphate
  modified_base 4: mod_base = OTHER; note = 2'-O-methyladenosine-3'-phosphate
  modified_base 5: mod_base = OTHER; note = 2'-O-methylcytidine-3'-phosphate
  modified_base 6: mod_base = OTHER; note = 2'-deoxy-2'-fluoroadenosine-3'-phosphate
  modified_base 7: mod_base = OTHER; note = 2'-O-methyladenosine-3'-phosphate
  modified_base 8: mod_base = OTHER; note = 2'-deoxy-2'-fluoroadenosine-3'-phosphate
  modified_base 9: mod_base = OTHER; note = 2'-deoxy-2'-fluoroadenosine-3'-phosphate
  modified_base 10: mod_base = OTHER; note = 2'-O-methylguanosine-3'-phosphate
  modified_base 11: mod_base = OTHER; note = 2'-O-methylcytidine-3'-phosphate
  modified_base 12: mod_base = OTHER; note = 2'-O-methyladenosine-3'-phosphate
  modified_base 13: mod_base = OTHER; note = 2'-O-methyluridine-3'-phosphate
  modified_base 14: mod_base = OTHER; note = 2'-deoxy-2'-fluoroadenosine-3'-phosphate
  modified_base 15: mod_base = OTHER; note = 2'-O-methylguanosine-3'-phosphate
  modified_base 16: mod_base = OTHER; note = 2'-deoxy-2'-fluorocytidine-3'-phosphate
  modified_base 17: mod_base = OTHER; note = 2'-O-methyladenosine-3'-phosphate
  modified_base 18: mod_base = OTHER; note = 2'-O-methylguanosine-3'-phosphate
  modified_base 19: mod_base = OTHER; note = 2'-O-methyladenosine-3'-phosphate
  modified_base 20: mod_base = OTHER; note = 2'-O-methylguanosine-3'-phosphate
  modified_base 21: mod_base = OTHER; note = 2'-O-methyluridine-3'-phosphorothioate
  modified_base 22: mod_base = OTHER; note = 2'-O-methylcytidine-3'-phosphorothioate
  modified_base 23: mod_base = OTHER; note = 2'-O-methylcytidine
aagacaaaagcatagcagagtcc

SEQ ID NO: 29 - RNA, 21 nt, synthetic construct
  source 1..21: mol_type = other RNA
  modified_base 1: mod_base = OTHER; note = 2'-O-methylcytidine-3'-phosphorothioate
  modified_base 2: mod_base = OTHER; note = 2'-O-methyluridine-3'-phosphorothioate
  modified_base 3: mod_base = OTHER; note = 2'-O-methylcytidine-3'-phosphate
  modified_base 4: mod_base = OTHER; note = 2'-O-methyluridine-3'-phosphate
  modified_base 5: mod_base = OTHER; note = 2'-O-methylguanosine-3'-phosphate
  modified_base 6: mod_base = OTHER; note = 2'-O-methylcytidine-3'-phosphate
  modified_base 7: mod_base = OTHER; note = 2'-deoxy-2'-fluorouridine-3'-phosphate
  modified_base 8: mod_base = OTHER; note = 2'-O-methyladenosine-3'-phosphate
  modified_base 9: mod_base = OTHER; note = 2'-deoxy-2'-fluorouridine-3'-phosphate
  modified_base 10: mod_base = OTHER; note = 2'-deoxy-2'-fluoroguanosine-3'-phosphate
  modified_base 11: mod_base = OTHER; note = 2'-deoxy-2'-fluorocytidine-3'-phosphate
  modified_base 12: mod_base = OTHER; note = 2'-O-methyluridine-3'-phosphate
  modified_base 13: mod_base = OTHER; note = 2'-O-methyluridine-3'-phosphate
  modified_base 14: mod_base = OTHER; note = 2'-O-methyluridine-3'-phosphate
  modified_base 15: mod_base = OTHER; note = 2'-O-methyluridine-3'-phosphate
  modified_base 16: mod_base = OTHER; note = 2'-O-methylguanosine-3'-phosphate
  modified_base 17: mod_base = OTHER; note = 2'-O-methyluridine-3'-phosphate
  modified_base 18: mod_base = OTHER; note = 2'-O-methylcytidine-3'-phosphate
  modified_base 19: mod_base = OTHER; note = 2'-O-methyluridine-3'-phosphate
  modified_base 20: mod_base = OTHER; note = 2'-O-methylguanosine-3'-phosphate
  modified_base 21: mod_base = OTHER; note = 2'-O-methyluridine-3'-phosphate ((2S,4R)-1-[29-[[2-(acetylamino)-2-deoxy-beta-D-galactopyra nosyl]oxy]-14,14-bis[[3-[[3-[[5-[[2-(acetylamino)-2-deoxy-b eta-D-galactopyranosyl]oxy]-1-oxopentyl]amino]propyl]amino] -3-oxopropoxy]methyl]-1,12,19,25-tetraoxo-16-oxa-13,20,24-t riazanonacos-1-yl]-4-hydroxy-2-pyrrolidinyl)methyl ester
ctctgctatgcttttgtctgt

SEQ ID NO: 30 - RNA, 23 nt, synthetic construct
  source 1..23: mol_type = other RNA
  modified_base 1: mod_base = OTHER; note = 2'-O-methyladenosine-3'-phosphorothioate
  modified_base 2: mod_base = OTHER; note = 2'-deoxy-2'-fluorocytidine-3'-phosphorothioate
  modified_base 3: mod_base = OTHER; note = 2'-O-methyladenosine-3'-phosphate
  modified_base 4: mod_base = OTHER; note = 2'-O-methylguanosine-3'-phosphate
  modified_base 5: mod_base = OTHER; note = 2'-O-methyladenosine-3'-phosphate
  modified_base 6: mod_base = OTHER; note = 2'-deoxy-2'-fluorocytidine-3'-phosphate
  modified_base 7: mod_base = OTHER; note = 2'-O-methyladenosine-3'-phosphate
  modified_base 8: mod_base = OTHER; note = 2'-deoxy-2'-fluoroadenosine-3'-phosphate
  modified_base 9: mod_base = OTHER; note = 2'-deoxy-2'-fluoroadenosine-3'-phosphate
  modified_base 10: mod_base = OTHER; note = 2'-O-methyladenosine-3'-phosphate
  modified_base 11: mod_base = OTHER; note = 2'-O-methylguanosine-3'-phosphate
  modified_base 12: mod_base = OTHER; note = 2'-O-methylcytidine-3'-phosphate
  modified_base 13: mod_base = OTHER; note = 2'-O-methyladenosine-3'-phosphate
  modified_base 14: mod_base = OTHER; note = 2'-deoxy-2'-fluorouridine-3'-phosphate
  modified_base 15: mod_base = OTHER; note = 2'-O-methyladenosine-3'-phosphate
  modified_base 16: mod_base = OTHER; note = 2'-deoxy-2'-fluoroguanosine-3'-phosphate
  modified_base 17: mod_base = OTHER; note = 2'-O-methylcytidine-3'-phosphate
  modified_base 18: mod_base = OTHER; note = 2'-O-methyladenosine-3'-phosphate
  modified_base 19: mod_base = OTHER; note = 2'-O-methylguanosine-3'-phosphate
  modified_base 20: mod_base = OTHER; note = 2'-O-methyladenosine-3'-phosphate
  modified_base 21: mod_base = OTHER; note = 2'-O-methylguanosine-3'-phosphorothioate
  modified_base 22: mod_base = OTHER; note = 2'-O-methyluridine-3'-phosphorothioate
  modified_base 23: mod_base = OTHER; note = 2'-O-methylcytidine
acagacaaaagcatagcagagtc

SEQ ID NO: 31 - RNA, 21 nt, synthetic construct
  source 1..21: mol_type = other RNA
  modified_base 1: mod_base = OTHER; note = 2'-O-methyluridine-3'-phosphorothioate
  modified_base 2: mod_base = OTHER; note = 2'-O-methylguanosine-3'-phosphorothioate
  modified_base 3: mod_base = OTHER; note = 2'-O-methylguanosine-3'-phosphate
  modified_base 4: mod_base = OTHER; note = 2'-O-methylcytidine-3'-phosphate
  modified_base 5: mod_base = OTHER; note = 2'-O-methyluridine-3'-phosphate
  modified_base 6: mod_base = OTHER; note = 2'-O-methylguanosine-3'-phosphate
  modified_base 7: mod_base = OTHER; note = 2'-deoxy-2'-fluorouridine-3'-phosphate
  modified_base 8: mod_base = OTHER; note = 2'-O-methyluridine-3'-phosphate
  modified_base 9: mod_base = OTHER; note = 2'-deoxy-2'-fluorocytidine-3'-phosphate
  modified_base 10: mod_base = OTHER; note = 2'-deoxy-2'-fluorocytidine-3'-phosphate
  modified_base 11: mod_base = OTHER; note = 2'-deoxy-2'-fluorocytidine-3'-phosphate
  modified_base 12: mod_base = OTHER; note = 2'-O-methyladenosine-3'-phosphate
  modified_base 13: mod_base = OTHER; note = 2'-O-methylcytidine-3'-phosphate
  modified_base 14: mod_base = OTHER; note = 2'-O-methyluridine-3'-phosphate
  modified_base 15: mod_base = OTHER; note = 2'-O-methyluridine-3'-phosphate
  modified_base 16: mod_base = OTHER; note = 2'-O-methyladenosine-3'-phosphate
  modified_base 17: mod_base = OTHER; note = 2'-O-methylcytidine-3'-phosphate
  modified_base 18: mod_base = OTHER; note = 2'-O-methyluridine-3'-phosphate
  modified_base 19: mod_base = OTHER; note = 2'-O-methylguanosine-3'-phosphate
  modified_base 20: mod_base = OTHER; note = 2'-O-methylcytidine-3'-phosphate
  modified_base 21: mod_base = OTHER; note = 2'-O-methyluridine-3'-phosphate ((2S,4R)-1-[29-[[2-(acetylamino)-2-deoxy-beta-D-galactopyra nosyl]oxy]-14,14-bis[[3-[[3-[[5-[[2-(acetylamino)-2-deoxy-b eta-D-galactopyranosyl]oxy]-1-oxopentyl]amino]propyl]amino] -3-oxopropoxy]methyl]-1,12,19,25-tetraoxo-16-oxa-13,20,24-t riazanonacos-1-yl]-4-hydroxy-2-pyrrolidinyl)methyl ester
tggctgttcccacttactgct

SEQ ID NO: 32 - RNA, 23 nt, synthetic construct
  source 1..23: mol_type = other RNA
  modified_base 1: mod_base = OTHER; note = 2'-O-methyladenosine-3'-phosphorothioate
  modified_base 2: mod_base = OTHER; note = 2'-deoxy-2'-fluoroguanosine-3'-phosphorothioate
  modified_base 3: mod_base = OTHER; note = 2'-O-methylcytidine-3'-phosphate
  modified_base 4: mod_base = OTHER; note = 2'-O-methyladenosine-3'-phosphate
  modified_base 5: mod_base = OTHER; note = 2'-O-methylguanosine-3'-phosphate
  modified_base 6: mod_base = OTHER; note = 2'-deoxy-2'-fluorouridine-3'-phosphate
  modified_base 7: mod_base = OTHER; note = 2'-O-methyladenosine-3'-phosphate
  modified_base 8: mod_base = OTHER; note = 2'-deoxy-2'-fluoroadenosine-3'-phosphate
  modified_base 9: mod_base = OTHER; note = 2'-deoxy-2'-fluoroguanosine-3'-phosphate
  modified_base 10: mod_base = OTHER; note = 2'-O-methyluridine-3'-phosphate
  modified_base 11: mod_base = OTHER; note = 2'-O-methylguanosine-3'-phosphate
  modified_base 12: mod_base = OTHER; note = 2'-O-methylguanosine-3'-phosphate
  modified_base 13: mod_base = OTHER; note = 2'-O-methylguanosine-3'-phosphate
  modified_base 14: mod_base = OTHER; note = 2'-deoxy-2'-fluoroadenosine-3'-phosphate
  modified_base 15: mod_base = OTHER; note = 2'-O-methyladenosine-3'-phosphate
  modified_base 16: mod_base = OTHER; note = 2'-deoxy-2'-fluorocytidine-3'-phosphate
  modified_base 17: mod_base = OTHER; note = 2'-O-methyladenosine-3'-phosphate
  modified_base 18: mod_base = OTHER; note = 2'-O-methylguanosine-3'-phosphate
  modified_base 19: mod_base = OTHER; note = 2'-O-methylcytidine-3'-phosphate
  modified_base 20: mod_base = OTHER; note = 2'-O-methylcytidine-3'-phosphate
  modified_base 21: mod_base = OTHER; note = 2'-O-methyladenosine-3'-phosphorothioate
  modified_base 22: mod_base = OTHER; note = 2'-O-methylguanosine-3'-phosphorothioate
  modified_base 23: mod_base = OTHER; note = 2'-O-methyladenosine
agcagtaagtgggaacagccaga

SEQ ID NO: 33 - RNA, 21 nt, synthetic construct
  source 1..21: mol_type = other RNA
  modified_base 1: mod_base = OTHER; note = 2'-O-methylcytidine-3'-phosphorothioate
  modified_base 2: mod_base = OTHER; note = 2'-O-methylcytidine-3'-phosphorothioate
  modified_base 3: mod_base = OTHER; note = 2'-O-methyladenosine-3'-phosphate
  modified_base 4: mod_base = OTHER; note = 2'-O-methylcytidine-3'-phosphate
  modified_base 5: mod_base = OTHER; note = 2'-O-methyluridine-3'-phosphate
  modified_base 6: mod_base = OTHER; note = 2'-O-methyluridine-3'-phosphate
  modified_base 7: mod_base = OTHER; note = 2'-deoxy-2'-fluoroadenosine-3'-phosphate
  modified_base 8: mod_base = OTHER; note = 2'-O-methylcytidine-3'-phosphate
  modified_base 9: mod_base = OTHER; note = 2'-deoxy-2'-fluorouridine-3'-phosphate
  modified_base 10: mod_base = OTHER; note = 2'-deoxy-2'-fluoroguanosine-3'-phosphate
  modified_base 11: mod_base = OTHER; note = 2'-deoxy-2'-fluorocytidine-3'-phosphate
  modified_base 12: mod_base = OTHER; note = 2'-O-methyladenosine-3'-phosphate
  modified_base 13: mod_base = OTHER; note = 2'-O-methylcytidine-3'-phosphate
  modified_base 14: mod_base = OTHER; note = 2'-O-methyladenosine-3'-phosphate
  modified_base 15: mod_base = OTHER; note = 2'-O-methyladenosine-3'-phosphate
  modified_base 16: mod_base = OTHER; note = 2'-O-methylcytidine-3'-phosphate
  modified_base 17: mod_base = OTHER; note = 2'-O-methyladenosine-3'-phosphate
  modified_base 18: mod_base = OTHER; note = 2'-O-methyladenosine-3'-phosphate
  modified_base 19: mod_base = OTHER; note = 2'-O-methylguanosine-3'-phosphate
  modified_base 20: mod_base = OTHER; note = 2'-O-methylguanosine-3'-phosphate
  modified_base 21: mod_base = OTHER; note = 2'-O-methyluridine-3'-phosphate ((2S,4R)-1-[29-[[2-(acetylamino)-2-deoxy-beta-D-galactopyra nosyl]oxy]-14,14-bis[[3-[[3-[[5-[[2-(acetylamino)-2-deoxy-b eta-D-galactopyranosyl]oxy]-1-oxopentyl]amino]propyl]amino] -3-oxopropoxy]methyl]-1,12,19,25-tetraoxo-16-oxa-13,20,24-t riazanonacos-1-yl]-4-hydroxy-2-pyrrolidinyl)methyl ester
ccacttactgcacaacaaggt

SEQ ID NO: 34 - RNA, 23 nt, synthetic construct
  source 1..23: mol_type = other RNA
  modified_base 1: mod_base = OTHER; note = 2'-O-methyladenosine-3'-phosphorothioate
  modified_base 2: mod_base = OTHER; note = 2'-deoxy-2'-fluorocytidine-3'-phosphorothioate
  modified_base 3: mod_base = OTHER; note = 2'-O-methylcytidine-3'-phosphate
  modified_base 4: mod_base = OTHER; note = 2'-O-methyluridine-3'-phosphate
  modified_base 5: mod_base = OTHER; note = 2'-O-methyluridine-3'-phosphate
  modified_base 6: mod_base = OTHER; note = 2'-deoxy-2'-fluoroguanosine-3'-phosphate
  modified_base 7: mod_base = OTHER; note = 2'-O-methyluridine-3'-phosphate
  modified_base 8: mod_base = OTHER; note = 2'-deoxy-2'-fluorouridine-3'-phosphate
  modified_base 9: mod_base = OTHER; note = 2'-deoxy-2'-fluoroguanosine-3'-phosphate
  modified_base 10: mod_base = OTHER; note = 2'-O-methyluridine-3'-phosphate
  modified_base 11: mod_base = OTHER; note = 2'-O-methylguanosine-3'-phosphate
  modified_base 12: mod_base = OTHER; note = 2'-O-methylcytidine-3'-phosphate
  modified_base 13: mod_base = OTHER; note = 2'-O-methyladenosine-3'-phosphate
  modified_base 14: mod_base = OTHER; note = 2'-deoxy-2'-fluoroguanosine-3'-phosphate
  modified_base 15: mod_base = OTHER; note = 2'-O-methyluridine-3'-phosphate
  modified_base 16: mod_base = OTHER; note = 2'-deoxy-2'-fluoroadenosine-3'-phosphate
  modified_base 17: mod_base = OTHER; note = 2'-O-methyladenosine-3'-phosphate
  modified_base 18: mod_base = OTHER; note = 2'-O-methylguanosine-3'-phosphate
  modified_base 19: mod_base = OTHER; note = 2'-O-methyluridine-3'-phosphate
  modified_base 20: mod_base = OTHER; note = 2'-O-methylguanosine-3'-phosphate
  modified_base 21: mod_base = OTHER; note = 2'-O-methylguanosine-3'-phosphorothioate
  modified_base 22: mod_base = OTHER; note = 2'-O-methylguanosine-3'-phosphorothioate
  modified_base 23: mod_base = OTHER; note = 2'-O-methyladenosine
accttgttgtgcagtaagtggga

SEQ ID NO: 35 - RNA, 21 nt, synthetic construct
  source 1..21: mol_type = other RNA
  modified_base 1: mod_base = OTHER; note = 2'-O-methylcytidine-3'-phosphorothioate
  modified_base 2: mod_base = OTHER; note = 2'-O-methyluridine-3'-phosphorothioate
  modified_base 3: mod_base = OTHER; note = 2'-O-methylguanosine-3'-phosphate
  modified_base 4: mod_base = OTHER; note = 2'-O-methylcytidine-3'-phosphate
  modified_base 5: mod_base = OTHER; note = 2'-O-methylcytidine-3'-phosphate
  modified_base 6: mod_base = OTHER; note = 2'-O-methylcytidine-3'-phosphate
  modified_base 7: mod_base = OTHER; note = 2'-deoxy-2'-fluoroadenosine-3'-phosphate
  modified_base 8: mod_base = OTHER; note = 2'-O-methylcytidine-3'-phosphate
  modified_base 9: mod_base = OTHER; note = 2'-deoxy-2'-fluorouridine-3'-phosphate
  modified_base 10: mod_base = OTHER; note = 2'-deoxy-2'-fluoroguanosine-3'-phosphate
  modified_base 11: mod_base = OTHER; note = 2'-deoxy-2'-fluorouridine-3'-phosphate
  modified_base 12: mod_base = OTHER; note = 2'-O-methyladenosine-3'-phosphate
  modified_base 13: mod_base = OTHER; note = 2'-O-methyluridine-3'-phosphate
  modified_base 14: mod_base = OTHER; note = 2'-O-methyluridine-3'-phosphate
  modified_base 15: mod_base = OTHER; note = 2'-O-methylcytidine-3'-phosphate
  modified_base 16: mod_base = OTHER; note = 2'-O-methyluridine-3'-phosphate
  modified_base 17: mod_base = OTHER; note = 2'-O-methyluridine-3'-phosphate
  modified_base 18: mod_base = OTHER; note = 2'-O-methylcytidine-3'-phosphate
  modified_base 19: mod_base = OTHER; note = 2'-O-methyluridine-3'-phosphate
  modified_base 20: mod_base = OTHER; note = 2'-O-methyluridine-3'-phosphate
  modified_base 21: mod_base = OTHER; note = 2'-O-methyluridine-3'-phosphate ((2S,4R)-1-[29-[[2-(acetylamino)-2-deoxy-beta-D-galactopyra nosyl]oxy]-14,14-bis[[3-[[3-[[5-[[2-(acetylamino)-2-deoxy-b eta-D-galactopyranosyl]oxy]-1-oxopentyl]amino]propyl]amino] -3-oxopropoxy]methyl]-1,12,19,25-tetraoxo-16-oxa-13,20,24-t riazanonacos-1-yl]-4-hydroxy-2-pyrrolidinyl)methyl ester
ctgcccactgtattcttcttt

SEQ ID NO: 36 - RNA, 23 nt, synthetic construct
  source 1..23: mol_type = other RNA
  modified_base 1: mod_base = OTHER; note = 2'-O-methyladenosine-3'-phosphorothioate
  modified_base 2: mod_base = OTHER; note = 2'-deoxy-2'-fluoroadenosine-3'-phosphorothioate
  modified_base 3: mod_base = OTHER; note = 2'-O-methyladenosine-3'-phosphate
  modified_base 4: mod_base = OTHER; note = 2'-O-methylguanosine-3'-phosphate
  modified_base 5: mod_base = OTHER; note = 2'-O-methyladenosine-3'-phosphate
  modified_base 6: mod_base = OTHER; note = 2'-deoxy-2'-fluoroadenosine-3'-phosphate
  modified_base 7: mod_base = OTHER; note = 2'-O-methylguanosine-3'-phosphate
  modified_base 8: mod_base = OTHER; note = 2'-deoxy-2'-fluoroadenosine-3'-phosphate
  modified_base 9: mod_base = OTHER; note = 2'-deoxy-2'-fluoroadenosine-3'-phosphate
  modified_base 10: mod_base = OTHER; note = 2'-O-methyluridine-3'-phosphate
  modified_base 11: mod_base = OTHER; note = 2'-O-methyladenosine-3'-phosphate
  modified_base 12: mod_base = OTHER; note = 2'-O-methylcytidine-3'-phosphate
  modified_base 13: mod_base = OTHER; note = 2'-O-methyladenosine-3'-phosphate
  modified_base 14: mod_base = OTHER; note = 2'-deoxy-2'-fluoroguanosine-3'-phosphate
  modified_base 15: mod_base = OTHER; note = 2'-O-methyluridine-3'-phosphate
  modified_base 16: mod_base = OTHER; note = 2'-deoxy-2'-fluoroguanosine-3'-phosphate
  modified_base 17: mod_base = OTHER; note = 2'-O-methylguanosine-3'-phosphate
  modified_base 18: mod_base = OTHER; note = 2'-O-methylguanosine-3'-phosphate
  modified_base 19: mod_base = OTHER; note = 2'-O-methylcytidine-3'-phosphate
  modified_base 20: mod_base = OTHER; note = 2'-O-methyladenosine-3'-phosphate
  modified_base 21: mod_base = OTHER; note = 2'-O-methylguanosine-3'-phosphorothioate
  modified_base 22: mod_base = OTHER; note = 2'-O-methyladenosine-3'-phosphorothioate
  modified_base 23: mod_base = OTHER; note = 2'-O-methylguanosine
aaagaagaatacagtgggcagag

SEQ ID NO: 37 - RNA, 21 nt, synthetic construct
  source 1..21: mol_type = other RNA
  modified_base 1: mod_base = OTHER; note = 2'-O-methyladenosine-3'-phosphorothioate
  modified_base 2: mod_base = OTHER; note = 2'-O-methylcytidine-3'-phosphorothioate
  modified_base 3: mod_base = OTHER; note = 2'-O-methyladenosine-3'-phosphate
  modified_base 4: mod_base = OTHER; note = 2'-O-methyluridine-3'-phosphate
  modified_base 5: mod_base = OTHER; note = 2'-O-methylguanosine-3'-phosphate
  modified_base 6: mod_base = OTHER; note = 2'-O-methylcytidine-3'-phosphate
  modified_base 7: mod_base = OTHER; note = 2'-deoxy-2'-fluorouridine-3'-phosphate
  modified_base 8: mod_base = OTHER; note = 2'-O-methylcytidine-3'-phosphate
  modified_base 9: mod_base = OTHER; note = 2'-deoxy-2'-fluoroadenosine-3'-phosphate
  modified_base 10: mod_base = OTHER; note = 2'-deoxy-2'-fluorouridine-3'-phosphate
  modified_base 11: mod_base = OTHER; note = 2'-deoxy-2'-fluorouridine-3'-phosphate
  modified_base 12: mod_base = OTHER; note = 2'-O-methylguanosine-3'-phosphate
  modified_base 13: mod_base = OTHER; note = 2'-O-methylcytidine-3'-phosphate
  modified_base 14: mod_base = OTHER; note = 2'-O-methylcytidine-3'-phosphate
  modified_base 15: mod_base = OTHER; note = 2'-O-methyluridine-3'-phosphate
  modified_base 16: mod_base = OTHER; note = 2'-O-methyluridine-3'-phosphate
  modified_base 17: mod_base = OTHER; note = 2'-O-methyluridine-3'-phosphate
  modified_base 18: mod_base = OTHER; note = 2'-O-methyluridine-3'-phosphate
  modified_base 19: mod_base = OTHER; note = 2'-O-methylcytidine-3'-phosphate
  modified_base 20: mod_base = OTHER; note = 2'-O-methyladenosine-3'-phosphate
  modified_base 21: mod_base = OTHER; note = 2'-O-methyluridine-3'-phosphate ((2S,4R)-1-[29-[[2-(acetylamino)-2-deoxy-beta-D-galactopyra nosyl]oxy]-14,14-bis[[3-[[3-[[5-[[2-(acetylamino)-2-deoxy-b eta-D-galactopyranosyl]oxy]-1-oxopentyl]amino]propyl]amino] -3-oxopropoxy]methyl]-1,12,19,25-tetraoxo-16-oxa-13,20,24-t riazanonacos-1-yl]-4-hydroxy-2-pyrrolidinyl)methyl ester
acatgctcattgccttttcat

SEQ ID NO: 38 - RNA, 23 nt, synthetic construct
  source 1..23: mol_type = other RNA
  modified_base 1: mod_base = OTHER; note = 2'-O-methyladenosine-3'-phosphorothioate
  modified_base 2: mod_base = OTHER; note = 2'-deoxy-2'-fluorouridine-3'-phosphorothioate
  modified_base 3: mod_base = OTHER; note = 2'-O-methylguanosine-3'-phosphate
  modified_base 4: mod_base = OTHER; note = 2'-O-methyladenosine-3'-phosphate
  modified_base 5: mod_base = OTHER; note = 2'-O-methyladenosine-3'-phosphate
  modified_base 6: mod_base = OTHER; note = 2'-deoxy-2'-fluoroadenosine-3'-phosphate
  modified_base 7: mod_base = OTHER; note = 2'-O-methyladenosine-3'-phosphate
  modified_base 8: mod_base = OTHER; note = 2'-deoxy-2'-fluoroguanosine-3'-phosphate
  modified_base 9: mod_base = OTHER; note = 2'-deoxy-2'-fluoroguanosine-3'-phosphate
  modified_base 10: mod_base = OTHER; note = 2'-O-methylcytidine-3'-phosphate
  modified_base 11: mod_base = OTHER; note = 2'-O-methyladenosine-3'-phosphate
  modified_base 12: mod_base = OTHER; note = 2'-O-methyladenosine-3'-phosphate
  modified_base 13: mod_base = OTHER; note = 2'-O-methyluridine-3'-phosphate
  modified_base 14: mod_base = OTHER; note = 2'-deoxy-2'-fluoroguanosine-3'-phosphate
  modified_base 15: mod_base = OTHER; note = 2'-O-methyladenosine-3'-phosphate
  modified_base 16: mod_base = OTHER; note = 2'-deoxy-2'-fluoroguanosine-3'-phosphate
  modified_base 17: mod_base = OTHER; note = 2'-O-methylcytidine-3'-phosphate
  modified_base 18: mod_base = OTHER; note = 2'-O-methyladenosine-3'-phosphate
  modified_base 19: mod_base = OTHER; note = 2'-O-methyluridine-3'-phosphate
  modified_base 20: mod_base = OTHER; note = 2'-O-methylguanosine-3'-phosphate
  modified_base 21: mod_base = OTHER; note = 2'-O-methyluridine-3'-phosphorothioate
  modified_base 22: mod_base = OTHER; note = 2'-O-methyluridine-3'-phosphorothioate
  modified_base 23: mod_base = OTHER; note = 2'-O-methylcytidine
atgaaaaggcaatgagcatgttc

SEQ ID NO: 39 - RNA, 21 nt, synthetic construct
  source 1..21: mol_type = other RNA
  modified_base 1: mod_base = OTHER; note = 2'-O-methyluridine-3'-phosphorothioate
  modified_base 2: mod_base = OTHER; note = 2'-O-methylguanosine-3'-phosphorothioate
  modified_base 3: mod_base = OTHER; note = 2'-O-methylcytidine-3'-phosphate
  modified_base 4: mod_base = OTHER; note = 2'-O-methyluridine-3'-phosphate
  modified_base 5: mod_base = OTHER; note = 2'-O-methylcytidine-3'-phosphate
  modified_base 6: mod_base = OTHER; note = 2'-O-methyladenosine-3'-phosphate
  modified_base 7: mod_base = OTHER; note = 2'-deoxy-2'-fluorouridine-3'-phosphate
  modified_base 8: mod_base = OTHER; note = 2'-O-methyluridine-3'-phosphate
  modified_base 9: mod_base = OTHER; note = 2'-deoxy-2'-fluoroguanosine-3'-phosphate
  modified_base 10: mod_base = OTHER; note = 2'-deoxy-2'-fluorocytidine-3'-phosphate
  modified_base 11: mod_base = OTHER; note = 2'-deoxy-2'-fluorocytidine-3'-phosphate
  modified_base 12: mod_base = OTHER; note = 2'-O-methyluridine-3'-phosphate
  modified_base 13: mod_base = OTHER; note = 2'-O-methyluridine-3'-phosphate
  modified_base 14: mod_base = OTHER; note = 2'-O-methyluridine-3'-phosphate
  modified_base 15: mod_base = OTHER; note = 2'-O-methyluridine-3'-phosphate
  modified_base 16: mod_base = OTHER; note = 2'-O-methylcytidine-3'-phosphate
  modified_base 17: mod_base = OTHER; note = 2'-O-methyladenosine-3'-phosphate
  modified_base 18: mod_base = OTHER; note = 2'-O-methylcytidine-3'-phosphate
  modified_base 19: mod_base = OTHER; note = 2'-O-methyladenosine-3'-phosphate
  modified_base 20: mod_base = OTHER; note = 2'-O-methylguanosine-3'-phosphate
  modified_base 21: mod_base = OTHER; note = 2'-O-methyluridine-3'-phosphate ((2S,4R)-1-[29-[[2-(acetylamino)-2-deoxy-beta-D-galactopyra nosyl]oxy]-14,14-bis[[3-[[3-[[5-[[2-(acetylamino)-2-deoxy-b eta-D-galactopyranosyl]oxy]-1-oxopentyl]amino]propyl]amino] -3-oxopropoxy]methyl]-1,12,19,25-tetraoxo-16-oxa-13,20,24-t riazanonacos-1-yl]-4-hydroxy-2-pyrrolidinyl)methyl ester
tgctcattgccttttcacagt

SEQ ID NO: 40 - RNA, 23 nt, synthetic construct
  source 1..23: mol_type = other RNA
  modified_base 1: mod_base = OTHER; note = 2'-O-methyladenosine-3'-phosphorothioate
  modified_base 2: mod_base = OTHER; note = 2'-deoxy-2'-fluorocytidine-3'-phosphorothioate
  modified_base 3: mod_base = OTHER; note = 2'-O-methyluridine-3'-phosphate
  modified_base 4: mod_base = OTHER; note = 2'-O-methylguanosine-3'-phosphate
  modified_base 5: mod_base = OTHER; note = 2'-O-methyluridine-3'-phosphate
  modified_base 6: mod_base = OTHER; note = 2'-deoxy-2'-fluoroguanosine-3'-phosphate
  modified_base 7: mod_base = OTHER; note = 2'-O-methyladenosine-3'-phosphate
  modified_base 8: mod_base = OTHER; note = 2'-deoxy-2'-fluoroadenosine-3'-phosphate
  modified_base 9: mod_base = OTHER; note = 2'-deoxy-2'-fluoroadenosine-3'-phosphate
  modified_base 10: mod_base = OTHER; note = 2'-O-methyladenosine-3'-phosphate
  modified_base 11: mod_base = OTHER; note = 2'-O-methylguanosine-3'-phosphate
  modified_base 12: mod_base = OTHER; note = 2'-O-methylguanosine-3'-phosphate
  modified_base 13: mod_base = OTHER; note = 2'-O-methylcytidine-3'-phosphate
  modified_base 14: mod_base = OTHER; note = 2'-deoxy-2'-fluoroadenosine-3'-phosphate
  modified_base 15: mod_base = OTHER; note = 2'-O-methyladenosine-3'-phosphate
  modified_base 16: mod_base = OTHER; note = 2'-deoxy-2'-fluorouridine-3'-phosphate
  modified_base 17: mod_base = OTHER; note = 2'-O-methylguanosine-3'-phosphate
  modified_base 18: mod_base = OTHER; note = 2'-O-methyladenosine-3'-phosphate
  modified_base 19: mod_base = OTHER; note = 2'-O-methylguanosine-3'-phosphate
  modified_base 20: mod_base = OTHER; note = 2'-O-methylcytidine-3'-phosphate
  modified_base 21: mod_base = OTHER; note = 2'-O-methyladenosine-3'-phosphorothioate
  modified_base 22: mod_base = OTHER; note = 2'-O-methyluridine-3'-phosphorothioate
  modified_base 23: mod_base = OTHER; note = 2'-O-methylguanosine
actgtgaaaaggcaatgagcatg

SEQ ID NO: 41 - RNA, 21 nt, synthetic construct
  source 1..21: mol_type = other RNA
  modified_base 1: mod_base = OTHER; note = 2'-O-methyluridine-3'-phosphorothioate
  modified_base 2: mod_base = OTHER; note = 2'-O-methyluridine-3'-phosphorothioate
  modified_base 3: mod_base = OTHER; note = 2'-O-methyluridine-3'-phosphate
  modified_base 4: mod_base = OTHER; note = 2'-O-methyluridine-3'-phosphate
  modified_base 5: mod_base = OTHER; note = 2'-O-methylcytidine-3'-phosphate
  modified_base 6: mod_base = OTHER; note = 2'-O-methyladenosine-3'-phosphate
  modified_base 7: mod_base = OTHER; note = 2'-deoxy-2'-fluorocytidine-3'-phosphate
  modified_base 8: mod_base = OTHER; note = 2'-O-methyladenosine-3'-phosphate
  modified_base 9: mod_base = OTHER; note = 2'-deoxy-2'-fluoroguanosine-3'-phosphate
  modified_base 10: mod_base = OTHER; note = 2'-deoxy-2'-fluoroadenosine-3'-phosphate
  modified_base 11: mod_base = OTHER; note = 2'-deoxy-2'-fluoroadenosine-3'-phosphate
  modified_base 12: mod_base = OTHER; note = 2'-O-methylcytidine-3'-phosphate
  modified_base 13: mod_base = OTHER; note = 2'-O-methyluridine-3'-phosphate
  modified_base 14: mod_base = OTHER; note = 2'-O-methyluridine-3'-phosphate
  modified_base 15: mod_base = OTHER; note = 2'-O-methyluridine-3'-phosphate
  modified_base 16: mod_base = OTHER; note = 2'-O-methylcytidine-3'-phosphate
  modified_base 17: mod_base = OTHER; note = 2'-O-methyluridine-3'-phosphate
  modified_base 18: mod_base = OTHER; note = 2'-O-methylguanosine-3'-phosphate
  modified_base 19: mod_base = OTHER; note = 2'-O-methyluridine-3'-phosphate
  modified_base 20: mod_base = OTHER; note = 2'-O-methylguanosine-3'-phosphate
  modified_base 21: mod_base = OTHER; note = 2'-O-methyluridine-3'-phosphate ((2S,4R)-1-[29-[[2-(acetylamino)-2-deoxy-beta-D-galactopyra nosyl]oxy]-14,14-bis[[3-[[3-[[5-[[2-(acetylamino)-2-deoxy-b eta-D-galactopyranosyl]oxy]-1-oxopentyl]amino]propyl]amino] -3-oxopropoxy]methyl]-1,12,19,25-tetraoxo-16-oxa-13,20,24-t riazanonacos-1-yl]-4-hydroxy-2-pyrrolidinyl)methyl ester
ttttcacagaactttctgtgt

SEQ ID NO: 42 - RNA, 23 nt, synthetic construct
  source 1..23: mol_type = other RNA
  modified_base 1: mod_base = OTHER; note = 2'-O-methyladenosine-3'-phosphorothioate
  modified_base 2: mod_base = OTHER; note = 2'-deoxy-2'-fluorocytidine-3'-phosphorothioate
  modified_base 3: mod_base = OTHER; note = 2'-O-methyladenosine-3'-phosphate
  modified_base 4: mod_base = OTHER; note = 2'-O-methylcytidine-3'-phosphate
  modified_base 5: mod_base = OTHER; note = 2'-O-methyladenosine-3'-phosphate
  modified_base 6: mod_base = OTHER; note = 2'-deoxy-2'-fluoroguanosine-3'-phosphate
  modified_base 7: mod_base = OTHER; note = 2'-O-methyladenosine-3'-phosphate
  modified_base 8: mod_base = OTHER; note = 2'-deoxy-2'-fluoroadenosine-3'-phosphate
  modified_base 9: mod_base = OTHER; note = 2'-deoxy-2'-fluoroadenosine-3'-phosphate
  modified_base 10: mod_base = OTHER; note = 2'-O-methylguanosine-3'-phosphate
  modified_base 11: mod_base = OTHER; note = 2'-O-methyluridine-3'-phosphate
  modified_base 12: mod_base = OTHER; note = 2'-O-methyluridine-3'-phosphate
  modified_base 13: mod_base = OTHER; note = 2'-O-methylcytidine-3'-phosphate
  modified_base 14: mod_base = OTHER; note = 2'-deoxy-2'-fluorouridine-3'-phosphate
  modified_base 15: mod_base = OTHER; note = 2'-O-methylguanosine-3'-phosphate
  modified_base 16: mod_base = OTHER; note = 2'-deoxy-2'-fluorouridine-3'-phosphate
  modified_base 17: mod_base = OTHER; note = 2'-O-methylguanosine-3'-phosphate
  modified_base 18: mod_base = OTHER; note = 2'-O-methyladenosine-3'-phosphate
  modified_base 19: mod_base = OTHER; note = 2'-O-methyladenosine-3'-phosphate
  modified_base 20: mod_base = OTHER; note = 2'-O-methyladenosine-3'-phosphate
  modified_base 21: mod_base = OTHER; note = 2'-O-methyladenosine-3'-phosphorothioate
  modified_base 22: mod_base = OTHER; note = 2'-O-methylguanosine-3'-phosphorothioate
  modified_base 23: mod_base = OTHER; note = 2'-O-methylguanosine
acacagaaagttctgtgaaaagg

SEQ ID NO: 43 - RNA, 21 nt, synthetic construct
  source 1..21: mol_type = other RNA
  modified_base 1: mod_base = OTHER; note = 2'-O-methylguanosine-3'-phosphorothioate
  modified_base 2: mod_base = OTHER; note = 2'-O-methyladenosine-3'-phosphorothioate
  modified_base 3: mod_base = OTHER; note = 2'-O-methylguanosine-3'-phosphate
  modified_base 4: mod_base = OTHER; note = 2'-O-methylcytidine-3'-phosphate
  modified_base 5: mod_base = OTHER; note = 2'-O-methyladenosine-3'-phosphate
  modified_base 6: mod_base = OTHER; note = 2'-O-methyluridine-3'-phosphate
  modified_base 7: mod_base = OTHER; note = 2'-deoxy-2'-fluorouridine-3'-phosphate
  modified_base 8: mod_base = OTHER; note = 2'-O-methyluridine-3'-phosphate
  modified_base 9: mod_base = OTHER; note = 2'-deoxy-2'-fluorouridine-3'-phosphate
  modified_base 10: mod_base = OTHER; note = 2'-deoxy-2'-fluoroadenosine-3'-phosphate
  modified_base 11: mod_base = OTHER; note = 2'-deoxy-2'-fluorocytidine-3'-phosphate
  modified_base 12: mod_base = OTHER; note = 2'-O-methyladenosine-3'-phosphate
  modified_base 13: mod_base = OTHER; note = 2'-O-methylcytidine-3'-phosphate
  modified_base 14: mod_base = OTHER; note = 2'-O-methylcytidine-3'-phosphate
  modified_base 15: mod_base = OTHER; note = 2'-O-methyluridine-3'-phosphate
  modified_base 16: mod_base = OTHER; note = 2'-O-methyluridine-3'-phosphate
  modified_base 17: mod_base = OTHER; note = 2'-O-methylguanosine-3'-phosphate
  modified_base 18: mod_base = OTHER; note = 2'-O-methyladenosine-3'-phosphate
  modified_base 19: mod_base = OTHER; note = 2'-O-methyladenosine-3'-phosphate
  modified_base 20: mod_base = OTHER; note = 2'-O-methylguanosine-3'-phosphate
  modified_base 21: mod_base = OTHER; note = 2'-O-methyluridine-3'-phosphate ((2S,4R)-1-[29-[[2-(acetylamino)-2-deoxy-beta-D-galactopyra nosyl]oxy]-14,14-bis[[3-[[3-[[5-[[2-(acetylamino)-2-deoxy-b eta-D-galactopyranosyl]oxy]-1-oxopentyl]amino]propyl]amino] -3-oxopropoxy]methyl]-1,12,19,25-tetraoxo-16-oxa-13,20,24-t riazanonacos-1-yl]-4-hydroxy-2-pyrrolidinyl)methyl ester
gagcattttacaccttgaagt

SEQ ID NO: 44 - RNA, 23 nt, synthetic construct
  source 1..23: mol_type = other RNA
  modified_base 1: mod_base = OTHER; note = 2'-O-methyladenosine-3'-phosphorothioate
  modified_base 2: mod_base = OTHER; note = 2'-deoxy-2'-fluorocytidine-3'-phosphorothioate
  modified_base 3: mod_base = OTHER; note = 2'-O-methyluridine-3'-phosphate
  modified_base 4: mod_base = OTHER; note = 2'-O-methyluridine-3'-phosphate
  modified_base 5: mod_base = OTHER; note = 2'-O-methylcytidine-3'-phosphate
  modified_base 6: mod_base = OTHER; note = 2'-deoxy-2'-fluoroadenosine-3'-phosphate
  modified_base 7: mod_base = OTHER; note = 2'-O-methyladenosine-3'-phosphate
  modified_base 8: mod_base = OTHER; note = 2'-deoxy-2'-fluoroguanosine-3'-phosphate
  modified_base 9: mod_base = OTHER; note = 2'-deoxy-2'-fluoroguanosine-3'-phosphate
  modified_base 10: mod_base = OTHER; note = 2'-O-methyluridine-3'-phosphate
  modified_base 11: mod_base = OTHER; note = 2'-O-methylguanosine-3'-phosphate
  modified_base 12: mod_base = OTHER; note = 2'-O-methyluridine-3'-phosphate
  modified_base 13: mod_base = OTHER; note = 2'-O-methyladenosine-3'-phosphate
  modified_base 14: mod_base = OTHER; note = 2'-deoxy-2'-fluoroadenosine-3'-phosphate
  modified_base 15: mod_base = OTHER; note = 2'-O-methyladenosine-3'-phosphate
  modified_base 16: mod_base = OTHER; note = 2'-deoxy-2'-fluoroadenosine-3'-phosphate
  modified_base 17: mod_base = OTHER; note = 2'-O-methyluridine-3'-phosphate
  modified_base 18: mod_base = OTHER; note = 2'-O-methylguanosine-3'-phosphate
  modified_base 19: mod_base = OTHER; note = 2'-O-methylcytidine-3'-phosphate
  modified_base 20: mod_base = OTHER; note = 2'-O-methyluridine-3'-phosphate
  modified_base 21: mod_base = OTHER; note = 2'-O-methylcytidine-3'-phosphorothioate
  modified_base 22: mod_base = OTHER; note = 2'-O-methylcytidine-3'-phosphorothioate
  modified_base 23: mod_base = OTHER; note = 2'-O-methylguanosine
acttcaaggtgtaaaatgctccg

SEQ ID NO: 45 - RNA, 21 nt, synthetic construct
  source 1..21: mol_type = other RNA
  modified_base 1: mod_base = OTHER; note = 2'-O-methyladenosine-3'-phosphorothioate
  modified_base 2: mod_base = OTHER; note = 2'-O-methyluridine-3'-phosphorothioate
  modified_base 3: mod_base = OTHER; note = 2'-O-methyluridine-3'-phosphate
  modified_base 4: mod_base = OTHER; note = 2'-O-methyluridine-3'-phosphate
  modified_base 5: mod_base = OTHER; note = 2'-O-methyluridine-3'-phosphate
  modified_base 6: mod_base = OTHER; note = 2'-O-methyladenosine-3'-phosphate
  modified_base 7: mod_base = OTHER; note = 2'-deoxy-2'-fluorocytidine-3'-phosphate
  modified_base 8: mod_base = OTHER; note = 2'-O-methyladenosine-3'-phosphate
  modified_base 9: mod_base = OTHER; note = 2'-deoxy-2'-fluorocytidine-3'-phosphate
  modified_base 10: mod_base = OTHER; note = 2'-deoxy-2'-fluorocytidine-3'-phosphate
  modified_base 11: mod_base = OTHER; note = 2'-deoxy-2'-fluorouridine-3'-phosphate
  modified_base 12: mod_base = OTHER; note = 2'-O-methyluridine-3'-phosphate
  modified_base 13: mod_base = OTHER; note = 2'-O-methylguanosine-3'-phosphate
  modified_base 14: mod_base = OTHER; note = 2'-O-methyladenosine-3'-phosphate
  modified_base 15: mod_base = OTHER; note = 2'-O-methyladenosine-3'-phosphate
  modified_base 16: mod_base = OTHER; note = 2'-O-methylguanosine-3'-phosphate
  modified_base 17: mod_base = OTHER; note = 2'-O-methyladenosine-3'-phosphate
  modified_base 18: mod_base = OTHER; note = 2'-O-methylcytidine-3'-phosphate
  modified_base 19: mod_base = OTHER; note = 2'-O-methylguanosine-3'-phosphate
  modified_base 20: mod_base = OTHER; note = 2'-O-methyluridine-3'-phosphate
  modified_base 21: mod_base = OTHER; note = 2'-O-methyluridine-3'-phosphate ((2S,4R)-1-[29-[[2-(acetylamino)-2-deoxy-beta-D-galactopyra nosyl]oxy]-14,14-bis[[3-[[3-[[5-[[2-(acetylamino)-2-deoxy-b eta-D-galactopyranosyl]oxy]-1-oxopentyl]amino]propyl]amino] -3-oxopropoxy]methyl]-1,12,19,25-tetraoxo-16-oxa-13,20,24-t riazanonacos-1-yl]-4-hydroxy-2-pyrrolidinyl)methyl ester
attttacaccttgaagacgtt

SEQ ID NO: 46 - RNA, 23 nt, synthetic construct
  source 1..23: mol_type = other RNA
  modified_base 1: mod_base = OTHER; note = 2'-O-methyladenosine-3'-phosphorothioate
  modified_base 2: mod_base = OTHER; note = 2'-deoxy-2'-fluoroadenosine-3'-phosphorothioate
  modified_base 3: mod_base = OTHER; note = 2'-O-methylcytidine-3'-phosphate
  modified_base 4: mod_base = OTHER; note = 2'-O-methylguanosine-3'-phosphate
  modified_base 5: mod_base = OTHER; note = 2'-O-methyluridine-3'-phosphate
  modified_base 6: mod_base = OTHER; note = 2'-deoxy-2'-fluorocytidine-3'-phosphate
  modified_base 7: mod_base = OTHER; note = 2'-O-methyluridine-3'-phosphate
  modified_base 8: mod_base = OTHER; note = 2'-deoxy-2'-fluorouridine-3'-phosphate
  modified_base 9: mod_base = OTHER; note = 2'-deoxy-2'-fluorocytidine-3'-phosphate
  modified_base 10: mod_base = OTHER; note = 2'-O-methyladenosine-3'-phosphate
  modified_base 11: mod_base = OTHER; note = 2'-O-methyladenosine-3'-phosphate
  modified_base 12: mod_base = OTHER; note = 2'-O-methylguanosine-3'-phosphate
  modified_base 13: mod_base = OTHER; note = 2'-O-methylguanosine-3'-phosphate
  modified_base 14: mod_base = OTHER; note = 2'-deoxy-2'-fluorouridine-3'-phosphate
  modified_base 15: mod_base = OTHER; note = 2'-O-methylguanosine-3'-phosphate
  modified_base 16: mod_base = OTHER; note = 2'-deoxy-2'-fluorouridine-3'-phosphate
  modified_base 17: mod_base = OTHER; note = 2'-O-methyladenosine-3'-phosphate
  modified_base 18: mod_base = OTHER; note = 2'-O-methyladenosine-3'-phosphate
  modified_base 19: mod_base = OTHER; note = 2'-O-methyladenosine-3'-phosphate
  modified_base 20: mod_base = OTHER; note = 2'-O-methyladenosine-3'-phosphate
  modified_base 21: mod_base = OTHER; note = 2'-O-methyluridine-3'-phosphorothioate
  modified_base 22: mod_base = OTHER; note = 2'-O-methylguanosine-3'-phosphorothioate
  modified_base 23: mod_base = OTHER; note = 2'-O-methylcytidine
aacgtcttcaaggtgtaaaatgc

SEQ ID NO: 47 - RNA, 21 nt, synthetic construct
  source 1..21: mol_type = other RNA
  modified_base 1: mod_base = OTHER; note = 2'-O-methylguanosine-3'-phosphorothioate
  modified_base 2: mod_base = OTHER; note = 2'-O-methylguanosine-3'-phosphorothioate
  modified_base 3: mod_base = OTHER; note = 2'-O-methyladenosine-3'-phosphate
  modified_base 4: mod_base = OTHER; note = 2'-O-methyluridine-3'-phosphate
  modified_base 5: mod_base = OTHER; note = 2'-O-methylguanosine-3'-phosphate
  modified_base 6: mod_base = OTHER; note = 2'-O-methyluridine-3'-phosphate
  modified_base 7: mod_base = OTHER; note = 2'-deoxy-2'-fluoroguanosine-3'-phosphate
  modified_base 8: mod_base = OTHER; note = 2'-O-methyladenosine-3'-phosphate
  modified_base 9: mod_base = OTHER; note = 2'-deoxy-2'-fluoroadenosine-3'-phosphate
  modified_base 10: mod_base = OTHER; note = 2'-deoxy-2'-fluoroadenosine-3'-phosphate
  modified_base 11: mod_base = OTHER; note = 2'-deoxy-2'-fluoroguanosine-3'-phosphate
  modified_base 12: mod_base = OTHER; note = 2'-O-methyladenosine-3'-phosphate
  modified_base 13: mod_base = OTHER; note = 2'-O-methylguanosine-3'-phosphate
  modified_base 14: mod_base = OTHER; note = 2'-O-methyluridine-3'-phosphate
  modified_base 15: mod_base = OTHER; note = 2'-O-methylcytidine-3'-phosphate
  modified_base 16: mod_base = OTHER; note = 2'-O-methyluridine-3'-phosphate
  modified_base 17: mod_base = OTHER; note = 2'-O-methyluridine-3'-phosphate
  modified_base 18: mod_base = OTHER; note = 2'-O-methyluridine-3'-phosphate
  modified_base 19: mod_base = OTHER; note = 2'-O-methyluridine-3'-phosphate
  modified_base 20: mod_base = OTHER; note = 2'-O-methylguanosine-3'-phosphate
  modified_base 21: mod_base = OTHER; note = 2'-O-methyluridine-3'-phosphate ((2S,4R)-1-[29-[[2-(acetylamino)-2-deoxy-beta-D-galactopyra nosyl]oxy]-14,14-bis[[3-[[3-[[5-[[2-(acetylamino)-2-deoxy-b eta-D-galactopyranosyl]oxy]-1-oxopentyl]amino]propyl]amino] -3-oxopropoxy]methyl]-1,12,19,25-tetraoxo-16-oxa-13,20,24-t riazanonacos-1-yl]-4-hydroxy-2-pyrrolidinyl)methyl ester
ggatgtgaaagagtcttttgt

SEQ ID NO: 48 - RNA, 23 nt, synthetic construct
  source 1..23: mol_type = other RNA
  modified_base 1: mod_base = OTHER; note = 2'-O-methyladenosine-3'-phosphorothioate
  modified_base 2: mod_base = OTHER; note = 2'-deoxy-2'-fluorocytidine-3'-phosphorothioate
  modified_base 3: mod_base = OTHER; note = 2'-O-methyladenosine-3'-phosphate
  modified_base 4: mod_base = OTHER; note = 2'-O-methyladenosine-3'-phosphate
  modified_base 5: mod_base = OTHER; note = 2'-O-methyladenosine-3'-phosphate
  modified_base 6: mod_base = OTHER; note = 2'-deoxy-2'-fluoroadenosine-3'-phosphate
  modified_base 7: mod_base = OTHER; note = 2'-O-methylguanosine-3'-phosphate
  modified_base 8: mod_base = OTHER; note = 2'-deoxy-2'-fluoroadenosine-3'-phosphate
  modified_base 9: mod_base = OTHER; note = 2'-deoxy-2'-fluorocytidine-3'-phosphate
  modified_base 10: mod_base = OTHER; note = 2'-O-methyluridine-3'-phosphate
  modified_base 11: mod_base = OTHER; note = 2'-O-methylcytidine-3'-phosphate
  modified_base 12: mod_base = OTHER; note = 2'-O-methyluridine-3'-phosphate
  modified_base 13: mod_base = OTHER; note = 2'-O-methyluridine-3'-phosphate
  modified_base 14: mod_base = OTHER; note = 2'-deoxy-2'-fluorouridine-3'-phosphate
  modified_base 15: mod_base = OTHER; note = 2'-O-methylcytidine-3'-phosphate
  modified_base 16: mod_base = OTHER; note = 2'-deoxy-2'-fluoroadenosine-3'-phosphate
  modified_base 17: mod_base = OTHER; note = 2'-O-methylcytidine-3'-phosphate
  modified_base 18: mod_base = OTHER; note = 2'-O-methyladenosine-3'-phosphate
  modified_base 19: mod_base = OTHER; note = 2'-O-methyluridine-3'-phosphate
  modified_base 20: mod_base = OTHER; note = 2'-O-methylcytidine-3'-phosphate
  modified_base 21: mod_base = OTHER; note = 2'-O-methylcytidine-3'-phosphorothioate
  modified_base 22: mod_base = OTHER; note = 2'-O-methyluridine-3'-phosphorothioate
  modified_base 23: mod_base = OTHER; note = 2'-O-methylcytidine
acaaaagactctttcacatcctc

SEQ ID NO: 49 - RNA, 21 nt, synthetic construct
  source 1..21: mol_type = other RNA
  modified_base 1: mod_base = OTHER; note = 2'-O-methylguanosine-3'-phosphorothioate
  modified_base 2: mod_base = OTHER; note = 2'-O-methyladenosine-3'-phosphorothioate
  modified_base 3: mod_base = OTHER; note = 2'-O-methyluridine-3'-phosphate
  modified_base 4: mod_base = OTHER; note = 2'-O-methylguanosine-3'-phosphate
  modified_base 5: mod_base = OTHER; note = 2'-O-methyluridine-3'-phosphate
  modified_base 6: mod_base = OTHER; note = 2'-O-methylguanosine-3'-phosphate
  modified_base 7: mod_base = OTHER; note = 2'-deoxy-2'-fluoroadenosine-3'-phosphate
  modified_base 8: mod_base = OTHER; note = 2'-O-methyladenosine-3'-phosphate
  modified_base 9: mod_base = OTHER; note = 2'-deoxy-2'-fluoroadenosine-3'-phosphate
  modified_base 10: mod_base = OTHER; note = 2'-deoxy-2'-fluoroguanosine-3'-phosphate
  modified_base 11: mod_base = OTHER; note = 2'-deoxy-2'-fluoroadenosine-3'-phosphate
  modified_base 12: mod_base = OTHER; note = 2'-O-methylguanosine-3'-phosphate
  modified_base 13: mod_base = OTHER; note = 2'-O-methyluridine-3'-phosphate
  modified_base 14: mod_base = OTHER; note = 2'-O-methylcytidine-3'-phosphate
  modified_base 15: mod_base = OTHER; note = 2'-O-methyluridine-3'-phosphate
  modified_base 16: mod_base = OTHER; note = 2'-O-methyluridine-3'-phosphate
  modified_base 17: mod_base = OTHER; note = 2'-O-methyluridine-3'-phosphate
  modified_base 18: mod_base = OTHER; note = 2'-O-methyluridine-3'-phosphate
  modified_base 19: mod_base = OTHER; note = 2'-O-methylguanosine-3'-phosphate
  modified_base 20: mod_base = OTHER; note = 2'-O-methyluridine-3'-phosphate
  modified_base 21: mod_base = OTHER; note = 2'-O-methyluridine-3'-phosphate ((2S,4R)-1-[29-[[2-(acetylamino)-2-deoxy-beta-D-galactopyra nosyl]oxy]-14,14-bis[[3-[[3-[[5-[[2-(acetylamino)-2-deoxy-b eta-D-galactopyranosyl]oxy]-1-oxopentyl]amino]propyl]amino] -3-oxopropoxy]methyl]-1,12,19,25-tetraoxo-16-oxa-13,20,24-t riazanonacos-1-yl]-4-hydroxy-2-pyrrolidinyl)methyl ester
gatgtgaaagagtcttttgtt

SEQ ID NO: 50 - RNA, 23 nt, synthetic construct
  source 1..23: mol_type = other RNA
  modified_base 1: mod_base = OTHER; note = 2'-O-methyladenosine-3'-phosphorothioate
  modified_base 2: mod_base = OTHER; note = 2'-deoxy-2'-fluoroadenosine-3'-phosphorothioate
  modified_base 3: mod_base = OTHER; note = 2'-O-methylcytidine-3'-phosphate
  modified_base 4: mod_base = OTHER; note = 2'-O-methyladenosine-3'-phosphate
  modified_base 5: mod_base = OTHER; note = 2'-O-methyladenosine-3'-phosphate
  modified_base 6: mod_base = OTHER; note = 2'-deoxy-2'-fluoroadenosine-3'-phosphate
  modified_base 7: mod_base = OTHER; note = 2'-O-methyladenosine-3'-phosphate
  modified_base 8: mod_base = OTHER; note = 2'-deoxy-2'-fluoroguanosine-3'-phosphate
  modified_base 9: mod_base = OTHER; note = 2'-deoxy-2'-fluoroadenosine-3'-phosphate
  modified_base 10: mod_base = OTHER; note = 2'-O-methylcytidine-3'-phosphate
  modified_base 11: mod_base = OTHER; note = 2'-O-methyluridine-3'-phosphate
  modified_base 12: mod_base = OTHER; note = 2'-O-methylcytidine-3'-phosphate
  modified_base 13: mod_base = OTHER; note = 2'-O-methyluridine-3'-phosphate
  modified_base 14: mod_base = OTHER; note = 2'-deoxy-2'-fluorouridine-3'-phosphate
  modified_base 15: mod_base = OTHER; note = 2'-O-methyluridine-3'-phosphate
  modified_base 16: mod_base = OTHER; note = 2'-deoxy-2'-fluorocytidine-3'-phosphate
  modified_base 17: mod_base = OTHER; note = 2'-O-methyladenosine-3'-phosphate
  modified_base 18: mod_base = OTHER; note = 2'-O-methylcytidine-3'-phosphate
  modified_base 19: mod_base = OTHER; note = 2'-O-methyladenosine-3'-phosphate
  modified_base 20: mod_base = OTHER; note = 2'-O-methyluridine-3'-phosphate
  modified_base 21: mod_base = OTHER; note = 2'-O-methylcytidine-3'-phosphorothioate
  modified_base 22: mod_base = OTHER; note = 2'-O-methylcytidine-3'-phosphorothioate
  modified_base 23: mod_base = OTHER; note = 2'-O-methyluridine
aacaaaagactctttcacatcct

SEQ ID NO: 51 - RNA, 21 nt, synthetic construct
  source 1..21: mol_type = other RNA
  modified_base 1: mod_base = OTHER; note = 2'-O-methyladenosine-3'-phosphorothioate
  modified_base 2: mod_base = OTHER; note = 2'-O-methyluridine-3'-phosphorothioate
  modified_base 3: mod_base = OTHER; note = 2'-O-methylguanosine-3'-phosphate
  modified_base 4: mod_base = OTHER; note = 2'-O-methyluridine-3'-phosphate
  modified_base 5: mod_base = OTHER; note = 2'-O-methylguanosine-3'-phosphate
  modified_base 6: mod_base = OTHER; note = 2'-O-methyladenosine-3'-phosphate
  modified_base 7: mod_base = OTHER; note = 2'-deoxy-2'-fluoroadenosine-3'-phosphate
  modified_base 8: mod_base = OTHER; note = 2'-O-methyladenosine-3'-phosphate
  modified_base 9: mod_base = OTHER; note = 2'-deoxy-2'-fluoroguanosine-3'-phosphate
  modified_base 10: mod_base = OTHER; note = 2'-deoxy-2'-fluoroadenosine-3'-phosphate
  modified_base 11: mod_base = OTHER; note = 2'-deoxy-2'-fluoroguanosine-3'-phosphate
  modified_base 12: mod_base = OTHER; note = 2'-O-methyluridine-3'-phosphate
  modified_base 13: mod_base = OTHER; note = 2'-O-methylcytidine-3'-phosphate
  modified_base 14: mod_base = OTHER; note = 2'-O-methyluridine-3'-phosphate
  modified_base 15: mod_base = OTHER; note = 2'-O-methyluridine-3'-phosphate
  modified_base 16: mod_base = OTHER; note = 2'-O-methyluridine-3'-phosphate
  modified_base 17: mod_base = OTHER; note = 2'-O-methyluridine-3'-phosphate
  modified_base 18: mod_base = OTHER; note = 2'-O-methylguanosine-3'-phosphate
  modified_base 19: mod_base = OTHER; note = 2'-O-methyluridine-3'-phosphate
  modified_base 20: mod_base = OTHER; note = 2'-O-methyluridine-3'-phosphate
  modified_base 21: mod_base = OTHER; note = 2'-O-methyluridine-3'-phosphate ((2S,4R)-1-[29-[[2-(acetylamino)-2-deoxy-beta-D-galactopyra nosyl]oxy]-14,14-bis[[3-[[3-[[5-[[2-(acetylamino)-2-deoxy-b eta-D-galactopyranosyl]oxy]-1-oxopentyl]amino]propyl]amino] -3-oxopropoxy]methyl]-1,12,19,25-tetraoxo-16-oxa-13,20,24-t riazanonacos-1-yl]-4-hydroxy-2-pyrrolidinyl)methyl ester
atgtgaaagagtcttttgttt

SEQ ID NO: 52 - RNA, 23 nt, synthetic construct
  source 1..23: mol_type = other RNA
  modified_base 1: mod_base = OTHER; note = 2'-O-methyladenosine-3'-phosphorothioate
  modified_base 2: mod_base = OTHER; note = 2'-deoxy-2'-fluoroadenosine-3'-phosphorothioate
  modified_base 3: mod_base = OTHER; note = 2'-O-methyladenosine-3'-phosphate
  modified_base 4: mod_base = OTHER; note = 2'-O-methylcytidine-3'-phosphate
  modified_base 5: mod_base = OTHER; note = 2'-O-methyladenosine-3'-phosphate
  modified_base 6: mod_base = OTHER; note = 2'-deoxy-2'-fluoroadenosine-3'-phosphate
  modified_base 7: mod_base = OTHER; note = 2'-O-methyladenosine-3'-phosphate
  modified_base 8: mod_base = OTHER; note = 2'-deoxy-2'-fluoroadenosine-3'-phosphate
  modified_base 9: mod_base = OTHER; note = 2'-deoxy-2'-fluoroguanosine-3'-phosphate
  modified_base 10: mod_base = OTHER; note = 2'-O-methyladenosine-3'-phosphate
  modified_base 11: mod_base = OTHER; note = 2'-O-methylcytidine-3'-phosphate
  modified_base 12: mod_base = OTHER; note = 2'-O-methyluridine-3'-phosphate
  modified_base 13: mod_base = OTHER; note = 2'-O-methylcytidine-3'-phosphate
  modified_base 14: mod_base = OTHER; note = 2'-deoxy-2'-fluorouridine-3'-phosphate
  modified_base 15: mod_base = OTHER; note = 2'-O-methyluridine-3'-phosphate
  modified_base 16: mod_base = OTHER; note = 2'-deoxy-2'-fluorouridine-3'-phosphate
  modified_base 17: mod_base = OTHER; note = 2'-O-methylcytidine-3'-phosphate
  modified_base 18: mod_base = OTHER; note = 2'-O-methyladenosine-3'-phosphate
  modified_base 19: mod_base = OTHER; note = 2'-O-methylcytidine-3'-phosphate
  modified_base 20: mod_base = OTHER; note = 2'-O-methyladenosine-3'-phosphate
  modified_base 21: mod_base = OTHER; note = 2'-O-methyluridine-3'-phosphorothioate
  modified_base 22: mod_base = OTHER; note = 2'-O-methylcytidine-3'-phosphorothioate
  modified_base 23: mod_base = OTHER; note = 2'-O-methylcytidine
aaacaaaagactctttcacatcc

SEQ ID NO: 53 - RNA, 21 nt, synthetic construct
  source 1..21: mol_type = other RNA
  modified_base 1: mod_base = OTHER; note = 2'-O-methyluridine-3'-phosphorothioate
  modified_base 2: mod_base = OTHER; note = 2'-O-methyluridine-3'-phosphorothioate
  modified_base 3: mod_base = OTHER; note = 2'-O-methyluridine-3'-phosphate
  modified_base 4: mod_base = OTHER; note = 2'-O-methyluridine-3'-phosphate
  modified_base 5: mod_base = OTHER; note = 2'-O-methyluridine-3'-phosphate
  modified_base 6: mod_base = OTHER; note = 2'-O-methylguanosine-3'-phosphate
  modified_base 7: mod_base = OTHER; note = 2'-deoxy-2'-fluoroadenosine-3'-phosphate
  modified_base 8: mod_base = OTHER; note = 2'-O-methylguanosine-3'-phosphate
  modified_base 9: mod_base = OTHER; note = 2'-deoxy-2'-fluoroadenosine-3'-phosphate
  modified_base 10: mod_base = OTHER; note = 2'-deoxy-2'-fluoroadenosine-3'-phosphate
  modified_base 11: mod_base = OTHER; note = 2'-deoxy-2'-fluorouridine-3'-phosphate
  modified_base 12: mod_base = OTHER; note = 2'-O-methylguanosine-3'-phosphate
  modified_base 13: mod_base = OTHER; note = 2'-O-methyladenosine-3'-phosphate
  modified_base 14: mod_base = OTHER; note = 2'-O-methyluridine-3'-phosphate
  modified_base 15: mod_base = OTHER; note = 2'-O-methyluridine-3'-phosphate
  modified_base 16: mod_base = OTHER; note = 2'-O-methylcytidine-3'-phosphate
  modified_base 17: mod_base = OTHER; note = 2'-O-methyluridine-3'-phosphate
  modified_base 18: mod_base = OTHER; note = 2'-O-methyluridine-3'-phosphate
  modified_base 19: mod_base = OTHER; note = 2'-O-methyluridine-3'-phosphate
  modified_base 20: mod_base = OTHER; note = 2'-O-methylcytidine-3'-phosphate
  modified_base 21: mod_base = OTHER; note = 2'-O-methyluridine-3'-phosphate ((2S,4R)-1-[29-[[2-(acetylamino)-2-deoxy-beta-D-galactopyra nosyl]oxy]-14,14-bis[[3-[[3-[[5-[[2-(acetylamino)-2-deoxy-b eta-D-galactopyranosyl]oxy]-1-oxopentyl]amino]propyl]amino] -3-oxopropoxy]methyl]-1,12,19,25-tetraoxo-16-oxa-13,20,24-t riazanonacos-1-yl]-4-hydroxy-2-pyrrolidinyl)methyl ester
tttttgagaatgattctttct

SEQ ID NO: 54 - RNA, 23 nt, synthetic construct
  source 1..23: mol_type = other RNA
  modified_base 1: mod_base = OTHER; note = 2'-O-methyladenosine-3'-phosphorothioate
  modified_base 2: mod_base = OTHER; note = 2'-deoxy-2'-fluoroguanosine-3'-phosphorothioate
  modified_base 3: mod_base = OTHER; note = 2'-O-methyladenosine-3'-phosphate
  modified_base 4: mod_base = OTHER; note = 2'-O-methyladenosine-3'-phosphate
  modified_base 5: mod_base = OTHER; note = 2'-O-methyladenosine-3'-phosphate
  modified_base 6: mod_base = OTHER; note = 2'-deoxy-2'-fluoroguanosine-3'-phosphate
  modified_base 7: mod_base = OTHER; note = 2'-O-methyladenosine-3'-phosphate
  modified_base 8: mod_base = OTHER; note = 2'-deoxy-2'-fluoroadenosine-3'-phosphate
  modified_base 9: mod_base = OTHER; note = 2'-deoxy-2'-fluorouridine-3'-phosphate
  modified_base 10: mod_base = OTHER; note = 2'-O-methylcytidine-3'-phosphate
  modified_base 11: mod_base = OTHER; note = 2'-O-methyladenosine-3'-phosphate
  modified_base 12: mod_base = OTHER; note = 2'-O-methyluridine-3'-phosphate
  modified_base 13: mod_base = OTHER; note = 2'-O-methyluridine-3'-phosphate
  modified_base 14: mod_base = OTHER; note = 2'-deoxy-2'-fluorocytidine-3'-phosphate
  modified_base 15: mod_base = OTHER; note = 2'-O-methyluridine-3'-phosphate
  modified_base 16: mod_base = OTHER; note = 2'-deoxy-2'-fluorocytidine-3'-phosphate
  modified_base 17: mod_base = OTHER; note = 2'-O-methyladenosine-3'-phosphate
  modified_base 18: mod_base = OTHER; note = 2'-O-methyladenosine-3'-phosphate
  modified_base 19: mod_base = OTHER; note = 2'-O-methyladenosine-3'-phosphate
  modified_base 20: mod_base = OTHER; note = 2'-O-methyladenosine-3'-phosphate
  modified_base 21: mod_base = OTHER; note = 2'-O-methyladenosine-3'-phosphorothioate
  modified_base 22: mod_base = OTHER; note = 2'-O-methylcytidine-3'-phosphorothioate
  modified_base 23: mod_base = OTHER; note = 2'-O-methyladenosine
agaaagaatcattctcaaaaaca

SEQ ID NO: 55 - RNA, 21 nt, synthetic construct
  source 1..21: mol_type = other RNA
  modified_base 1: mod_base = OTHER; note = 2'-O-methylguanosine-3'-phosphorothioate
  modified_base 2: mod_base = OTHER; note = 2'-O-methyladenosine-3'-phosphorothioate
  modified_base 3: mod_base = OTHER; note = 2'-O-methylcytidine-3'-phosphate
  modified_base 4: mod_base = OTHER; note = 2'-O-methyluridine-3'-phosphate
  modified_base 5: mod_base = OTHER; note = 2'-O-methylcytidine-3'-phosphate
  modified_base 6: mod_base = OTHER; note = 2'-O-methyluridine-3'-phosphate
  modified_base 7: mod_base = OTHER; note = 2'-deoxy-2'-fluoroguanosine-3'-phosphate
  modified_base 8: mod_base = OTHER; note = 2'-O-methylcytidine-3'-phosphate
  modified_base 9: mod_base = OTHER; note = 2'-deoxy-2'-fluorouridine-3'-phosphate
  modified_base 10: mod_base = OTHER; note = 2'-deoxy-2'-fluoroadenosine-3'-phosphate
  modified_base 11: mod_base = OTHER; note = 2'-deoxy-2'-fluorouridine-3'-phosphate
  modified_base 12: mod_base = OTHER; note = 2'-O-methylguanosine-3'-phosphate
  modified_base 13: mod_base = OTHER; note = 2'-O-methylcytidine-3'-phosphate
  modified_base 14: mod_base = OTHER; note = 2'-O-methyluridine-3'-phosphate
  modified_base 15: mod_base = OTHER; note = 2'-O-methyluridine-3'-phosphate
  modified_base 16: mod_base = OTHER; note = 2'-O-methyluridine-3'-phosphate
  modified_base 17: mod_base = OTHER; note = 2'-O-methyluridine-3'-phosphate
  modified_base 18: mod_base = OTHER; note = 2'-O-methylguanosine-3'-phosphate
  modified_base 19: mod_base = OTHER; note = 2'-O-methyluridine-3'-phosphate
  modified_base 20: mod_base = OTHER; note = 2'-O-methylcytidine-3'-phosphate
  modified_base 21: mod_base = OTHER; note = 2'-O-methyluridine-3'-phosphate ((2S,4R)-1-[29-[[2-(acetylamino)-2-deoxy-beta-D-galactopyra nosyl]oxy]-14,14-bis[[3-[[3-[[5-[[2-(acetylamino)-2-deoxy-b eta-D-galactopyranosyl]oxy]-1-oxopentyl]amino]propyl]amino] -3-oxopropoxy]methyl]-1,12,19,25-tetraoxo-16-oxa-13,20,24-t riazanonacos-1-yl]-4-hydroxy-2-pyrrolidinyl)methyl ester
gactctgctatgcttttgtct

SEQ ID NO: 56 - RNA, 23 nt, synthetic construct
  source 1..23: mol_type = other RNA
  modified_base 1: mod_base = OTHER; note = 2'-O-methyladenosine-3'-phosphorothioate
  modified_base 2: mod_base = OTHER; note = 2'-deoxy-2'-fluoroguanosine-3'-phosphorothioate
  modified_base 3: mod_base = OTHER; note = 2'-O-methyladenosine-3'-phosphate
  modified_base 4: mod_base = OTHER; note = 2'-O-methylcytidine-3'-phosphate
  modified_base 5: mod_base = OTHER; note = 2'-O-methyladenosine-3'-phosphate
  modified_base 6: mod_base = OTHER; note = 2'-deoxy-2'-fluoroadenosine-3'-phosphate
  modified_base 7: mod_base = OTHER; note = 2'-O-methyladenosine-3'-phosphate
  modified_base 8: mod_base = OTHER; note = 2'-deoxy-2'-fluoroadenosine-3'-phosphate
  modified_base 9: mod_base = OTHER; note = 2'-deoxy-2'-fluoroguanosine-3'-phosphate
  modified_base 10: mod_base = OTHER; note = 2'-O-methylcytidine-3'-phosphate
  modified_base 11: mod_base = OTHER; note = 2'-O-methyladenosine-3'-phosphate
  modified_base 12: mod_base = OTHER; note = 2'-O-methyluridine-3'-phosphate
  modified_base 13: mod_base = OTHER; note = 2'-O-methyladenosine-3'-phosphate
  modified_base 14: mod_base = OTHER; note = 2'-deoxy-2'-fluoroguanosine-3'-phosphate
  modified_base 15: mod_base = OTHER; note = 2'-O-methylcytidine-3'-phosphate
  modified_base 16: mod_base = OTHER; note = 2'-deoxy-2'-fluoroadenosine-3'-phosphate
  modified_base 17: mod_base = OTHER; note = 2'-O-methylguanosine-3'-phosphate
  modified_base 18: mod_base = OTHER; note = 2'-O-methyladenosine-3'-phosphate
  modified_base 19: mod_base = OTHER; note = 2'-O-methylguanosine-3'-phosphate
  modified_base 20: mod_base = OTHER; note = 2'-O-methyluridine-3'-phosphate
  modified_base 21: mod_base = OTHER; note = 2'-O-methylcytidine-3'-phosphorothioate
  modified_base 22: mod_base = OTHER; note = 2'-O-methylcytidine-3'-phosphorothioate
  modified_base 23: mod_base = OTHER; note = 2'-O-methyluridine
agacaaaagcatagcagagtcct

SEQ ID NO: 57 - RNA, 21 nt, synthetic construct
  source 1..21: mol_type = other RNA
  modified_base 1: mod_base = OTHER; note = 2'-O-methylguanosine-3'-phosphorothioate
  modified_base 2: mod_base = OTHER; note = 2'-O-methyluridine-3'-phosphorothioate
  modified_base 3: mod_base = OTHER; note = 2'-O-methylguanosine-3'-phosphate
  modified_base 4: mod_base = OTHER; note = 2'-O-methyladenosine-3'-phosphate
  modified_base 5: mod_base = OTHER; note = 2'-O-methyladenosine-3'-phosphate
  modified_base 6: mod_base = OTHER; note = 2'-O-methyladenosine-3'-phosphate
  modified_base 7: mod_base = OTHER; note = 2'-deoxy-2'-fluoroguanosine-3'-phosphate
  modified_base 8: mod_base = OTHER; note = 2'-O-methyladenosine-3'-phosphate
  modified_base 9: mod_base = OTHER; note = 2'-deoxy-2'-fluoroguanosine-3'-phosphate
  modified_base 10: mod_base = OTHER; note = 2'-deoxy-2'-fluorouridine-3'-phosphate
  modified_base 11: mod_base = OTHER; note = 2'-deoxy-2'-fluorocytidine-3'-phosphate
  modified_base 12: mod_base = OTHER; note = 2'-O-methyluridine-3'-phosphate
  modified_base 13: mod_base = OTHER; note = 2'-O-methyluridine-3'-phosphate
  modified_base 14: mod_base = OTHER; note = 2'-O-methyluridine-3'-phosphate
  modified_base 15: mod_base = OTHER; note = 2'-O-methyluridine-3'-phosphate
  modified_base 16: mod_base = OTHER; note = 2'-O-methylguanosine-3'-phosphate
  modified_base 17: mod_base = OTHER; note = 2'-O-methyluridine-3'-phosphate
  modified_base 18: mod_base = OTHER; note = 2'-O-methyluridine-3'-phosphate
  modified_base 19: mod_base = OTHER; note = 2'-O-methyladenosine-3'-phosphate
  modified_base 20: mod_base = OTHER; note = 2'-O-methylguanosine-3'-phosphate
  modified_base 21: mod_base = OTHER; note = 2'-O-methyluridine-3'-phosphate ((2S,4R)-1-[29-[[2-(acetylamino)-2-deoxy-beta-D-galactopyra nosyl]oxy]-14,14-bis[[3-[[3-[[5-[[2-(acetylamino)-2-deoxy-b eta-D-galactopyranosyl]oxy]-1-oxopentyl]amino]propyl]amino] -3-oxopropoxy]methyl]-1,12,19,25-tetraoxo-16-oxa-13,20,24-t riazanonacos-1-yl]-4-hydroxy-2-pyrrolidinyl)methyl ester
gtgaaagagtcttttgttagt

SEQ ID NO: 58 - RNA, 23 nt, synthetic construct
  source 1..23: mol_type = other RNA
  modified_base 1: mod_base = OTHER; note = 2'-O-methyladenosine-3'-phosphorothioate
  modified_base 2: mod_base = OTHER; note = 2'-deoxy-2'-fluorocytidine-3'-phosphorothioate
  modified_base 3: mod_base = OTHER; note = 2'-O-methyluridine-3'-phosphate
  modified_base 4: mod_base = OTHER; note = 2'-O-methyladenosine-3'-phosphate
  modified_base 5: mod_base = OTHER; note = 2'-O-methyladenosine-3'-phosphate
  modified_base 6: mod_base = OTHER; note = 2'-deoxy-2'-fluorocytidine-3'-phosphate
  modified_base 7: mod_base = OTHER; note = 2'-O-methyladenosine-3'-phosphate
  modified_base 8: mod_base = OTHER; note = 2'-deoxy-2'-fluoroadenosine-3'-phosphate
  modified_base 9: mod_base = OTHER; note = 2'-deoxy-2'-fluoroadenosine-3'-phosphate
  modified_base 10: mod_base = OTHER; note = 2'-O-methyladenosine-3'-phosphate
  modified_base 11: mod_base = OTHER; note = 2'-O-methylguanosine-3'-phosphate
  modified_base 12: mod_base = OTHER; note = 2'-O-methyladenosine-3'-phosphate
  modified_base 13: mod_base = OTHER; note = 2'-O-methylcytidine-3'-phosphate
  modified_base 14: mod_base = OTHER; note = 2'-deoxy-2'-fluorouridine-3'-phosphate
  modified_base 15: mod_base = OTHER; note = 2'-O-methylcytidine-3'-phosphate
  modified_base 16: mod_base = OTHER; note = 2'-deoxy-2'-fluorouridine-3'-phosphate
  modified_base 17: mod_base = OTHER; note = 2'-O-methyluridine-3'-phosphate
  modified_base 18: mod_base = OTHER; note = 2'-O-methyluridine-3'-phosphate
  modified_base 19: mod_base = OTHER; note = 2'-O-methylcytidine-3'-phosphate
  modified_base 20: mod_base = OTHER; note = 2'-O-methyladenosine-3'-phosphate
  modified_base 21: mod_base = OTHER; note = 2'-O-methylcytidine-3'-phosphorothioate
  modified_base 22: mod_base = OTHER; note = 2'-O-methyladenosine-3'-phosphorothioate
  modified_base 23: mod_base = OTHER; note = 2'-O-methyluridine
actaacaaaagactctttcacat

SEQ ID NO: 59 - RNA, 21 nt, synthetic construct
  source 1..21: mol_type = other RNA
  modified_base 1: mod_base = OTHER; note = 2'-O-methyluridine-3'-phosphorothioate
  modified_base 2: mod_base = OTHER; note = 2'-O-methylcytidine-3'-phosphorothioate
  modified_base 3: mod_base = OTHER; note = 2'-O-methylguanosine-3'-phosphate
  modified_base 4: mod_base = OTHER; note = 2'-O-methylguanosine-3'-phosphate
  modified_base 5: mod_base = OTHER; note = 2'-O-methylguanosine-3'-phosphate
  modified_base 6: mod_base = OTHER; note = 2'-O-methylcytidine-3'-phosphate
  modified_base 7: mod_base = OTHER; note = 2'-deoxy-2'-fluoroadenosine-3'-phosphate
  modified_base 8: mod_base = OTHER; note = 2'-O-methyluridine-3'-phosphate
  modified_base 9: mod_base = OTHER; note = 2'-deoxy-2'-fluoroadenosine-3'-phosphate
  modified_base 10: mod_base = OTHER; note = 2'-deoxy-2'-fluoroadenosine-3'-phosphate
  modified_base 11: mod_base = OTHER; note = 2'-deoxy-2'-fluorouridine-3'-phosphate
  modified_base 12: mod_base = OTHER; note = 2'-O-methylguanosine-3'-phosphate
  modified_base 13: mod_base = OTHER; note = 2'-O-methyluridine-3'-phosphate
  modified_base 14: mod_base = OTHER; note = 2'-O-methyluridine-3'-phosphate
  modified_base 15: mod_base = OTHER; note = 2'-O-methyluridine-3'-phosphate
  modified_base 16: mod_base = OTHER; note = 2'-O-methyluridine-3'-phosphate
  modified_base 17: mod_base = OTHER; note = 2'-O-methyluridine-3'-phosphate
  modified_base 18: mod_base = OTHER; note = 2'-O-methylguanosine-3'-phosphate
  modified_base 19: mod_base = OTHER; note = 2'-O-methyladenosine-3'-phosphate
  modified_base 20: mod_base = OTHER; note = 2'-O-methylguanosine-3'-phosphate
  modified_base 21: mod_base = OTHER; note = 2'-O-methyluridine-3'-phosphate ((2S,4R)-1-[29-[[2-(acetylamino)-2-deoxy-beta-D-galactopyra nosyl]oxy]-14,14-bis[[3-[[3-[[5-[[2-(acetylamino)-2-deoxy-b eta-D-galactopyranosyl]oxy]-1-oxopentyl]amino]propyl]amino] -3-oxopropoxy]methyl]-1,12,19,25-tetraoxo-16-oxa-13,20,24-t riazanonacos-1-yl]-4-hydroxy-2-pyrrolidinyl)methyl ester
tcgggcataatgtttttgagt

SEQ ID NO: 60 - RNA, 23 nt, synthetic construct
  source 1..23: mol_type = other RNA
  modified_base 1: mod_base = OTHER; note = 2'-O-methyladenosine-3'-phosphorothioate
  modified_base 2: mod_base = OTHER; note = 2'-deoxy-2'-fluorocytidine-3'-phosphorothioate
  modified_base 3: mod_base = OTHER; note = 2'-O-methyluridine-3'-phosphate
  modified_base 4: mod_base = OTHER; note = 2'-O-methylcytidine-3'-phosphate
  modified_base 5: mod_base = OTHER; note = 2'-O-methyladenosine-3'-phosphate
  modified_base 6: mod_base = OTHER; note = 2'-deoxy-2'-fluoroadenosine-3'-phosphate
  modified_base 7: mod_base = OTHER; note = 2'-O-methyladenosine-3'-phosphate
  modified_base 8: mod_base = OTHER; note = 2'-deoxy-2'-fluoroadenosine-3'-phosphate
  modified_base 9: mod_base = OTHER; note = 2'-deoxy-2'-fluoroadenosine-3'-phosphate
  modified_base 10: mod_base = OTHER; note = 2'-O-methylcytidine-3'-phosphate
  modified_base 11: mod_base = OTHER; note = 2'-O-methyladenosine-3'-phosphate
  modified_base 12: mod_base = OTHER; note = 2'-O-methyluridine-3'-phosphate
  modified_base 13: mod_base = OTHER; note = 2'-O-methyluridine-3'-phosphate
  modified_base 14: mod_base = OTHER; note = 2'-deoxy-2'-fluoroadenosine-3'-phosphate
  modified_base 15: mod_base = OTHER; note = 2'-O-methyluridine-3'-phosphate
  modified_base 16: mod_base = OTHER; note = 2'-deoxy-2'-fluoroguanosine-3'-phosphate
  modified_base 17: mod_base = OTHER; note = 2'-O-methylcytidine-3'-phosphate
  modified_base 18: mod_base = OTHER; note = 2'-O-methylcytidine-3'-phosphate
  modified_base 19: mod_base = OTHER; note = 2'-O-methylcytidine-3'-phosphate
  modified_base 20: mod_base = OTHER; note = 2'-O-methylguanosine-3'-phosphate
  modified_base 21: mod_base = OTHER; note = 2'-O-methyladenosine-3'-phosphorothioate
  modified_base 22: mod_base = OTHER; note = 2'-O-methylguanosine-3'-phosphorothioate
  modified_base 23: mod_base = OTHER; note = 2'-O-methyladenosine
actcaaaaacattatgcccgaga

SEQ ID NO: 61 - RNA, 21 nt, synthetic construct
  source 1..21: mol_type = other RNA
  modified_base 1: mod_base = OTHER; note = 2'-O-methylguanosine-3'-phosphorothioate
  modified_base 2: mod_base = OTHER; note = 2'-O-methylguanosine-3'-phosphorothioate
  modified_base 3: mod_base = OTHER; note = 2'-O-methyladenosine-3'-phosphate
  modified_base 4: mod_base = OTHER; note = 2'-O-methylcytidine-3'-phosphate
  modified_base 5: mod_base = OTHER; note = 2'-O-methyluridine-3'-phosphate
  modified_base 6: mod_base = OTHER; note = 2'-O-methylcytidine-3'-phosphate
  modified_base 7: mod_base = OTHER; note = 2'-deoxy-2'-fluorouridine-3'-phosphate
  modified_base 8: mod_base = OTHER; note = 2'-O-methylguanosine-3'-phosphate
  modified_base 9: mod_base = OTHER; note = 2'-deoxy-2'-fluorocytidine-3'-phosphate
  modified_base 10: mod_base = OTHER; note = 2'-deoxy-2'-fluorouridine-3'-phosphate
  modified_base 11: mod_base = OTHER; note = 2'-deoxy-2'-fluoroadenosine-3'-phosphate
  modified_base 12: mod_base = OTHER; note = 2'-O-methyluridine-3'-phosphate
  modified_base 13: mod_base = OTHER; note = 2'-O-methylguanosine-3'-phosphate
  modified_base 14: mod_base = OTHER; note = 2'-O-methylcytidine-3'-phosphate
  modified_base 15: mod_base = OTHER; note = 2'-O-methyluridine-3'-phosphate
  modified_base 16: mod_base = OTHER; note = 2'-O-methyluridine-3'-phosphate
  modified_base 17: mod_base = OTHER; note = 2'-O-methyluridine-3'-phosphate
  modified_base 18: mod_base = OTHER; note = 2'-O-methyluridine-3'-phosphate
  modified_base 19: mod_base = OTHER; note = 2'-O-methylguanosine-3'-phosphate
  modified_base 20: mod_base = OTHER; note = 2'-O-methyluridine-3'-phosphate
  modified_base 21: mod_base = OTHER; note = 2'-O-methyluridine-3'-phosphate ((2S,4R)-1-[29-[[2-(acetylamino)-2-deoxy-beta-D-galactopyra nosyl]oxy]-14,14-bis[[3-[[3-[[5-[[2-(acetylamino)-2-deoxy-b eta-D-galactopyranosyl]oxy]-1-oxopentyl]amino]propyl]amino] -3-oxopropoxy]methyl]-1,12,19,25-tetraoxo-16-oxa-13,20,24-t riazanonacos-1-yl]-4-hydroxy-2-pyrrolidinyl)methyl ester
ggactctgctatgcttttgtt

SEQ ID NO: 62 - RNA, 23 nt, synthetic construct
  source 1..23: mol_type = other RNA
  modified_base 1: mod_base = OTHER; note = 2'-O-methyladenosine-3'-phosphorothioate
  modified_base 2: mod_base = OTHER; note = 2'-deoxy-2'-fluoroadenosine-3'-phosphorothioate
  modified_base 3: mod_base = OTHER; note = 2'-O-methylcytidine-3'-phosphate
  modified_base 4: mod_base = OTHER; note = 2'-O-methyladenosine-3'-phosphate
  modified_base 5: mod_base = OTHER; note = 2'-O-methyladenosine-3'-phosphate
  modified_base 6: mod_base = OTHER; note = 2'-deoxy-2'-fluoroadenosine-3'-phosphate
  modified_base 7: mod_base = OTHER; note = 2'-O-methyladenosine-3'-phosphate
  modified_base 8: mod_base = OTHER; note = 2'-deoxy-2'-fluoroguanosine-3'-phosphate
  modified_base 9: mod_base = OTHER; note = 2'-deoxy-2'-fluorocytidine-3'-phosphate
  modified_base 10: mod_base = OTHER; note = 2'-O-methyladenosine-3'-phosphate
  modified_base 11: mod_base = OTHER; note = 2'-O-methyluridine-3'-phosphate
  modified_base 12: mod_base = OTHER; note = 2'-O-methyladenosine-3'-phosphate
  modified_base 13: mod_base = OTHER; note = 2'-O-methylguanosine-3'-phosphate
  modified_base 14: mod_base = OTHER; note = 2'-deoxy-2'-fluorocytidine-3'-phosphate
  modified_base 15: mod_base = OTHER; note = 2'-O-methyladenosine-3'-phosphate
  modified_base 16: mod_base = OTHER; note = 2'-deoxy-2'-fluoroguanosine-3'-phosphate
  modified_base 17: mod_base = OTHER; note = 2'-O-methyladenosine-3'-phosphate
  modified_base 18: mod_base = OTHER; note = 2'-O-methylguanosine-3'-phosphate
  modified_base 19: mod_base = OTHER; note = 2'-O-methyluridine-3'-phosphate
  modified_base 20: mod_base = OTHER; note = 2'-O-methylcytidine-3'-phosphate
  modified_base 21: mod_base = OTHER; note = 2'-O-methylcytidine-3'-phosphorothioate
  modified_base 22: mod_base = OTHER; note = 2'-O-methyluridine-3'-phosphorothioate
  modified_base 23: mod_base = OTHER; note = 2'-O-methyluridine
aacaaaagcatagcagagtcctt

SEQ ID NO: 63 - RNA, 21 nt, synthetic construct
  source 1..21: mol_type = other RNA
  modified_base 1: mod_base = OTHER; note = 2'-O-methylcytidine-3'-phosphorothioate
  modified_base 2: mod_base = OTHER; note = 2'-O-methyluridine-3'-phosphorothioate
  modified_base 3: mod_base = OTHER; note = 2'-O-methylcytidine-3'-phosphate
  modified_base 4: mod_base = OTHER; note = 2'-O-methyluridine-3'-phosphate
  modified_base 5: mod_base = OTHER; note = 2'-O-methylguanosine-3'-phosphate
  modified_base 6: mod_base = OTHER; note = 2'-O-methylcytidine-3'-phosphate
  modified_base 7: mod_base = OTHER; note = 2'-deoxy-2'-fluorocytidine-3'-phosphate
  modified_base 8: mod_base = OTHER; note = 2'-O-methylcytidine-3'-phosphate
  modified_base 9: mod_base = OTHER; note = 2'-deoxy-2'-fluoroadenosine-3'-phosphate
  modified_base 10: mod_base = OTHER; note = 2'-deoxy-2'-fluorocytidine-3'-phosphate
  modified_base 11: mod_base = OTHER; note = 2'-deoxy-2'-fluorouridine-3'-phosphate
  modified_base 12: mod_base = OTHER; note = 2'-O-methylguanosine-3'-phosphate
  modified_base 13: mod_base = OTHER; note = 2'-O-methyluridine-3'-phosphate
  modified_base 14: mod_base = OTHER; note = 2'-O-methyladenosine-3'-phosphate
  modified_base 15: mod_base = OTHER; note = 2'-O-methyluridine-3'-phosphate
  modified_base 16: mod_base = OTHER; note = 2'-O-methyluridine-3'-phosphate
  modified_base 17: mod_base = OTHER; note = 2'-O-methylcytidine-3'-phosphate
  modified_base 18: mod_base = OTHER; note = 2'-O-methyluridine-3'-phosphate
  modified_base 19: mod_base = OTHER; note = 2'-O-methyluridine-3'-phosphate
  modified_base 20: mod_base = OTHER; note = 2'-O-methylcytidine-3'-phosphate
  modified_base 21: mod_base = OTHER; note = 2'-O-methyluridine-3'-phosphate ((2S,4R)-1-[29-[[2-(acetylamino)-2-deoxy-beta-D-galactopyra nosyl]oxy]-14,14-bis[[3-[[3-[[5-[[2-(acetylamino)-2-deoxy-b eta-D-galactopyranosyl]oxy]-1-oxopentyl]amino]propyl]amino] -3-oxopropoxy]methyl]-1,12,19,25-tetraoxo-16-oxa-13,20,24-t riazanonacos-1-yl]-4-hydroxy-2-pyrrolidinyl)methyl ester
ctctgcccactgtattcttct

SEQ ID NO: 64 - RNA, 23 nt, synthetic construct
  source 1..23: mol_type = other RNA
  modified_base 1: mod_base = OTHER; note = 2'-O-methyladenosine-3'-phosphorothioate
  modified_base 2: mod_base = OTHER; note = 2'-deoxy-2'-fluoroguanosine-3'-phosphorothioate
  modified_base 3: mod_base = OTHER; note = 2'-O-methyladenosine-3'-phosphate
  modified_base 4: mod_base = OTHER; note = 2'-O-methyladenosine-3'-phosphate
  modified_base 5: mod_base = OTHER; note = 2'-O-methylguanosine-3'-phosphate
  modified_base 6: mod_base = OTHER; note = 2'-deoxy-2'-fluoroadenosine-3'-phosphate
  modified_base 7: mod_base = OTHER; note = 2'-O-methyladenosine-3'-phosphate
  modified_base 8: mod_base = OTHER; note = 2'-deoxy-2'-fluorouridine-3'-phosphate
  modified_base 9: mod_base = OTHER; note = 2'-deoxy-2'-fluoroadenosine-3'-phosphate
  modified_base 10: mod_base = OTHER; note = 2'-O-methylcytidine-3'-phosphate
  modified_base 11: mod_base = OTHER; note = 2'-O-methyladenosine-3'-phosphate
  modified_base 12: mod_base = OTHER; note = 2'-O-methylguanosine-3'-phosphate
  modified_base 13: mod_base = OTHER; note = 2'-O-methyluridine-3'-phosphate
  modified_base 14: mod_base = OTHER; note = 2'-deoxy-2'-fluoroguanosine-3'-phosphate
  modified_base 15: mod_base = OTHER; note = 2'-O-methylguanosine-3'-phosphate
  modified_base 16: mod_base = OTHER; note = 2'-deoxy-2'-fluoroguanosine-3'-phosphate
  modified_base 17: mod_base = OTHER; note = 2'-O-methylcytidine-3'-phosphate
  modified_base 18: mod_base = OTHER; note = 2'-O-methyladenosine-3'-phosphate
  modified_base 19: mod_base = OTHER; note = 2'-O-methylguanosine-3'-phosphate
  modified_base 20: mod_base = OTHER; note = 2'-O-methyladenosine-3'-phosphate
  modified_base 21: mod_base = OTHER; note = 2'-O-methylguanosine-3'-phosphorothioate
  modified_base 22: mod_base = OTHER; note = 2'-O-methyladenosine-3'-phosphorothioate
  modified_base 23: mod_base = OTHER; note = 2'-O-methylcytidine
agaagaatacagtgggcagagac

SEQ ID NO: 65 - RNA, 21 nt, synthetic construct
  source 1..21: mol_type = other RNA
  modified_base 1: mod_base = OTHER; note = 2'-O-methyluridine-3'-phosphorothioate
  modified_base 2: mod_base = OTHER; note = 2'-O-methylcytidine-3'-phosphorothioate
  modified_base 3: mod_base = OTHER; note = 2'-O-methyluridine-3'-phosphate
  modified_base 4: mod_base = OTHER; note = 2'-O-methylguanosine-3'-phosphate
  modified_base 5: mod_base = OTHER; note = 2'-O-methylcytidine-3'-phosphate
  modified_base 6: mod_base = OTHER; note = 2'-O-methylcytidine-3'-phosphate
  modified_base 7: mod_base = OTHER; note = 2'-deoxy-2'-fluorocytidine-3'-phosphate
  modified_base 8: mod_base = OTHER; note = 2'-O-methyladenosine-3'-phosphate
  modified_base 9: mod_base = OTHER; note = 2'-deoxy-2'-fluorocytidine-3'-phosphate
  modified_base 10: mod_base = OTHER; note = 2'-deoxy-2'-fluorouridine-3'-phosphate
  modified_base 11: mod_base = OTHER; note = 2'-deoxy-2'-fluoroguanosine-3'-phosphate
  modified_base 12: mod_base = OTHER; note = 2'-O-methyluridine-3'-phosphate
  modified_base 13: mod_base = OTHER; note = 2'-O-methyladenosine-3'-phosphate
  modified_base 14: mod_base = OTHER; note = 2'-O-methyluridine-3'-phosphate
  modified_base 15: mod_base = OTHER; note = 2'-O-methyluridine-3'-phosphate
  modified_base 16: mod_base = OTHER; note = 2'-O-methylcytidine-3'-phosphate
  modified_base 17: mod_base = OTHER; note = 2'-O-methyluridine-3'-phosphate
  modified_base 18: mod_base = OTHER; note = 2'-O-methyluridine-3'-phosphate
  modified_base 19: mod_base = OTHER; note = 2'-O-methylcytidine-3'-phosphate
  modified_base 20: mod_base = OTHER; note = 2'-O-methyluridine-3'-phosphate
  modified_base 21: mod_base = OTHER; note = 2'-O-methyluridine-3'-phosphate ((2S,4R)-1-[29-[[2-(acetylamino)-2-deoxy-beta-D-galactopyra nosyl]oxy]-14,14-bis[[3-[[3-[[5-[[2-(acetylamino)-2-deoxy-b eta-D-galactopyranosyl]oxy]-1-oxopentyl]amino]propyl]amino] -3-oxopropoxy]methyl]-1,12,19,25-tetraoxo-16-oxa-13,20,24-t riazanonacos-1-yl]-4-hydroxy-2-pyrrolidinyl)methyl ester
tctgcccactgtattcttctt

SEQ ID NO: 66 - RNA, 23 nt, synthetic construct
  source 1..23: mol_type = other RNA
  modified_base 1: mod_base = OTHER; note = 2'-O-methyladenosine-3'-phosphorothioate
  modified_base 2: mod_base = OTHER; note = 2'-deoxy-2'-fluoroadenosine-3'-phosphorothioate
  modified_base 3: mod_base = OTHER; note = 2'-O-methylguanosine-3'-phosphate
  modified_base 4: mod_base = OTHER; note = 2'-O-methyladenosine-3'-phosphate
  modified_base 5: mod_base = OTHER; note = 2'-O-methyladenosine-3'-phosphate
  modified_base 6: mod_base = OTHER; note = 2'-deoxy-2'-fluoroguanosine-3'-phosphate
  modified_base 7: mod_base = OTHER; note = 2'-O-methyladenosine-3'-phosphate
  modified_base 8: mod_base = OTHER; note = 2'-deoxy-2'-fluoroadenosine-3'-phosphate
  modified_base 9: mod_base = OTHER; note = 2'-deoxy-2'-fluorouridine-3'-phosphate
  modified_base 10: mod_base = OTHER; note = 2'-O-methyladenosine-3'-phosphate
  modified_base 11: mod_base = OTHER; note = 2'-O-methylcytidine-3'-phosphate
  modified_base 12: mod_base = OTHER; note = 2'-O-methyladenosine-3'-phosphate
  modified_base 13: mod_base = OTHER; note = 2'-O-methylguanosine-3'-phosphate
  modified_base 14: mod_base = OTHER; note = 2'-deoxy-2'-fluorouridine-3'-phosphate
  modified_base 15: mod_base = OTHER; note = 2'-O-methylguanosine-3'-phosphate
  modified_base 16: mod_base = OTHER; note = 2'-deoxy-2'-fluoroguanosine-3'-phosphate
  modified_base 17: mod_base = OTHER; note = 2'-O-methylguanosine-3'-phosphate
  modified_base 18: mod_base = OTHER; note = 2'-O-methylcytidine-3'-phosphate
  modified_base 19: mod_base = OTHER; note = 2'-O-methyladenosine-3'-phosphate
  modified_base 20: mod_base = OTHER; note = 2'-O-methylguanosine-3'-phosphate
  modified_base 21: mod_base = OTHER; note = 2'-O-methyladenosine-3'-phosphorothioate
  modified_base 22: mod_base = OTHER; note = 2'-O-methylguanosine-3'-phosphorothioate
  modified_base 23: mod_base = OTHER; note = 2'-O-methyladenosine
aagaagaatacagtgggcagaga

SEQ ID NO: 67 - RNA, 21 nt, synthetic construct
  source 1..21: mol_type = other RNA
  modified_base 1: mod_base = OTHER; note = 2'-O-methyluridine-3'-phosphorothioate
  modified_base 2: mod_base = OTHER; note = 2'-O-methyluridine-3'-phosphorothioate
  modified_base 3: mod_base = OTHER; note = 2'-O-methyluridine-3'-phosphate
  modified_base 4: mod_base = OTHER; note = 2'-O-methyladenosine-3'-phosphate
  modified_base 5: mod_base = OTHER; note = 2'-O-methylguanosine-3'-phosphate
  modified_base 6: mod_base = OTHER; note = 2'-O-methyladenosine-3'-phosphate
  modified_base 7: mod_base = OTHER; note = 2'-deoxy-2'-fluoroadenosine-3'-phosphate
  modified_base 8: mod_base = OTHER; note = 2'-O-methylguanosine-3'-phosphate
  modified_base 9: mod_base = OTHER; note = 2'-deoxy-2'-fluorouridine-3'-phosphate
  modified_base 10: mod_base = OTHER; note = 2'-deoxy-2'-fluoroguanosine-3'-phosphate
  modified_base 11: mod_base = OTHER; note = 2'-deoxy-2'-fluoroadenosine-3'-phosphate
  modified_base 12: mod_base = OTHER; note = 2'-O-methylcytidine-3'-phosphate
  modified_base 13: mod_base = OTHER; note = 2'-O-methyluridine-3'-phosphate
  modified_base 14: mod_base = OTHER; note = 2'-O-methyluridine-3'-phosphate
  modified_base 15: mod_base = OTHER; note = 2'-O-methyluridine-3'-phosphate
  modified_base 16: mod_base = OTHER; note = 2'-O-methylguanosine-3'-phosphate
  modified_base 17: mod_base = OTHER; note = 2'-O-methyluridine-3'-phosphate
  modified_base 18: mod_base = OTHER; note = 2'-O-methylguanosine-3'-phosphate
  modified_base 19: mod_base = OTHER; note = 2'-O-methyladenosine-3'-phosphate
  modified_base 20: mod_base = OTHER; note = 2'-O-methyladenosine-3'-phosphate
  modified_base 21: mod_base = OTHER; note = 2'-O-methyluridine-3'-phosphate ((2S,4R)-1-[29-[[2-(acetylamino)-2-deoxy-beta-D-galactopyra nosyl]oxy]-14,14-bis[[3-[[3-[[5-[[2-(acetylamino)-2-deoxy-b eta-D-galactopyranosyl]oxy]-1-oxopentyl]amino]propyl]amino] -3-oxopropoxy]methyl]-1,12,19,25-tetraoxo-16-oxa-13,20,24-t riazanonacos-1-yl]-4-hydroxy-2-pyrrolidinyl)methyl ester
tttagaagtgactttgtgaat

SEQ ID NO: 68 - RNA, 23 nt, synthetic construct
  source 1..23: mol_type = other RNA
  modified_base 1: mod_base = OTHER; note = 2'-O-methyladenosine-3'-phosphorothioate
  modified_base 2: mod_base = OTHER; note = 2'-deoxy-2'-fluorouridine-3'-phosphorothioate
  modified_base 3: mod_base = OTHER; note = 2'-O-methyluridine-3'-phosphate
  modified_base 4: mod_base = OTHER; note = 2'-O-methylcytidine-3'-phosphate
  modified_base 5: mod_base = OTHER; note = 2'-O-methyladenosine-3'-phosphate
  modified_base 6: mod_base = OTHER; note = 2'-deoxy-2'-fluorocytidine-3'-phosphate
  modified_base 7: mod_base = OTHER; note = 2'-O-methyladenosine-3'-phosphate
  modified_base 8: mod_base = OTHER; note = 2'-deoxy-2'-fluoroadenosine-3'-phosphate
  modified_base 9: mod_base = OTHER; note = 2'-deoxy-2'-fluoroadenosine-3'-phosphate
  modified_base 10: mod_base = OTHER; note = 2'-O-methylguanosine-3'-phosphate
  modified_base 11: mod_base = OTHER; note = 2'-O-methyluridine-3'-phosphate
  modified_base 12: mod_base = OTHER; note = 2'-O-methylcytidine-3'-phosphate
  modified_base 13: mod_base = OTHER; note = 2'-O-methyladenosine-3'-phosphate
  modified_base 14: mod_base = OTHER; note = 2'-deoxy-2'-fluorocytidine-3'-phosphate
  modified_base 15: mod_base = OTHER; note = 2'-O-methyluridine-3'-phosphate
  modified_base 16: mod_base = OTHER; note = 2'-deoxy-2'-fluorouridine-3'-phosphate
  modified_base 17: mod_base = OTHER; note = 2'-O-methylcytidine-3'-phosphate
  modified_base 18: mod_base = OTHER; note = 2'-O-methyluridine-3'-phosphate
  modified_base 19: mod_base = OTHER; note = 2'-O-methyladenosine-3'-phosphate
  modified_base 20: mod_base = OTHER; note = 2'-O-methyladenosine-3'-phosphate
  modified_base 21: mod_base = OTHER; note = 2'-O-methyladenosine-3'-phosphorothioate
  modified_base 22: mod_base = OTHER; note = 2'-O-methylcytidine-3'-phosphorothioate
  modified_base 23: mod_base = OTHER; note = 2'-O-methyladenosine
attcacaaagtcacttctaaaca

SEQ ID NO: 69 - RNA, 21 nt, synthetic construct
  source 1..21: mol_type = other RNA
  modified_base 1: mod_base = OTHER; note = 2'-O-methyladenosine-3'-phosphorothioate
  modified_base 2: mod_base = OTHER; note = 2'-O-methylcytidine-3'-phosphorothioate
  modified_base 3: mod_base = OTHER; note = 2'-O-methyladenosine-3'-phosphate
  modified_base 4: mod_base = OTHER; note = 2'-O-methyluridine-3'-phosphate
  modified_base 5: mod_base = OTHER; note = 2'-O-methylguanosine-3'-phosphate
  modified_base 6: mod_base = OTHER; note = 2'-O-methyladenosine-3'-phosphate
  modified_base 7: mod_base = OTHER; note = 2'-deoxy-2'-fluoroadenosine-3'-phosphate
  modified_base 8: mod_base = OTHER; note = 2'-O-methyladenosine-3'-phosphate
  modified_base 9: mod_base = OTHER; note = 2'-deoxy-2'-fluorouridine-3'-phosphate
  modified_base 10: mod_base = OTHER; note = 2'-deoxy-2'-fluoroadenosine-3'-phosphate
  modified_base 11: mod_base = OTHER; note = 2'-deoxy-2'-fluoroguanosine-3'-phosphate
  modified_base 12: mod_base = OTHER; note = 2'-O-methyluridine-3'-phosphate
  modified_base 13: mod_base = OTHER; note = 2'-O-methyluridine-3'-phosphate
  modified_base 14: mod_base = OTHER; note = 2'-O-methylguanosine-3'-phosphate
  modified_base 15: mod_base = OTHER; note = 2'-O-methyluridine-3'-phosphate
  modified_base 16: mod_base = OTHER; note = 2'-O-methylcytidine-3'-phosphate
  modified_base 17: mod_base = OTHER; note = 2'-O-methylcytidine-3'-phosphate
  modified_base 18: mod_base = OTHER; note = 2'-O-methyluridine-3'-phosphate
  modified_base 19: mod_base = OTHER; note = 2'-O-methyladenosine-3'-phosphate
  modified_base 20: mod_base = OTHER; note = 2'-O-methylguanosine-3'-phosphate
  modified_base 21: mod_base = OTHER; note = 2'-O-methyluridine-3'-phosphate ((2S,4R)-1-[29-[[2-(acetylamino)-2-deoxy-beta-D-galactopyra nosyl]oxy]-14,14-bis[[3-[[3-[[5-[[2-(acetylamino)-2-deoxy-b eta-D-galactopyranosyl]oxy]-1-oxopentyl]amino]propyl]amino] -3-oxopropoxy]methyl]-1,12,19,25-tetraoxo-16-oxa-13,20,24-t riazanonacos-1-yl]-4-hydroxy-2-pyrrolidinyl)methyl ester
acatgaaatagttgtcctagt

SEQ ID NO: 70 - RNA, 23 nt, synthetic construct
  source 1..23: mol_type = other RNA
  modified_base 1: mod_base = OTHER; note = 2'-O-methyladenosine-3'-phosphorothioate
  modified_base 2: mod_base = OTHER; note = 2'-deoxy-2'-fluorocytidine-3'-phosphorothioate
  modified_base 3: mod_base = OTHER; note = 2'-O-methyluridine-3'-phosphate
  modified_base 4: mod_base = OTHER; note = 2'-O-methyladenosine-3'-phosphate
  modified_base 5: mod_base = OTHER; note = 2'-O-methylguanosine-3'-phosphate
  modified_base 6: mod_base = OTHER; note = 2'-deoxy-2'-fluoroguanosine-3'-phosphate
  modified_base 7: mod_base = OTHER; note = 2'-O-methyladenosine-3'-phosphate
  modified_base 8: mod_base = OTHER; note = 2'-deoxy-2'-fluorocytidine-3'-phosphate
  modified_base 9: mod_base = OTHER; note = 2'-deoxy-2'-fluoroadenosine-3'-phosphate
  modified_base 10: mod_base = OTHER; note = 2'-O-methyladenosine-3'-phosphate
  modified_base 11: mod_base = OTHER; note = 2'-O-methylcytidine-3'-phosphate
  modified_base 12: mod_base = OTHER; note = 2'-O-methyluridine-3'-phosphate
  modified_base 13: mod_base = OTHER; note = 2'-O-methyladenosine-3'-phosphate
  modified_base 14: mod_base = OTHER; note = 2'-deoxy-2'-fluorouridine-3'-phosphate
  modified_base 15: mod_base = OTHER; note = 2'-O-methyluridine-3'-phosphate
  modified_base 16: mod_base = OTHER; note = 2'-deoxy-2'-fluorouridine-3'-phosphate
  modified_base 17: mod_base = OTHER; note = 2'-O-methylcytidine-3'-phosphate
  modified_base 18: mod_base = OTHER; note = 2'-O-methyladenosine-3'-phosphate
  modified_base 19: mod_base = OTHER; note = 2'-O-methyluridine-3'-phosphate
  modified_base 20: mod_base = OTHER; note = 2'-O-methylguanosine-3'-phosphate
  modified_base 21: mod_base = OTHER; note = 2'-O-methyluridine-3'-phosphorothioate
  modified_base 22: mod_base = OTHER; note = 2'-O-methylcytidine-3'-phosphorothioate
  modified_base 23: mod_base = OTHER; note = 2'-O-methylcytidine
actaggacaactatttcatgtcc

SEQ ID NO: 71 - RNA, 21 nt, synthetic construct
  source 1..21: mol_type = other RNA
  modified_base 1: mod_base = OTHER; note = 2'-O-methyluridine-3'-phosphorothioate
  modified_base 2: mod_base = OTHER; note = 2'-O-methylguanosine-3'-phosphorothioate
  modified_base 3: mod_base = OTHER; note = 2'-O-methyladenosine-3'-phosphate
  modified_base 4: mod_base = OTHER; note = 2'-O-methyladenosine-3'-phosphate
  modified_base 5: mod_base = OTHER; note = 2'-O-methyladenosine-3'-phosphate
  modified_base 6: mod_base = OTHER; note = 2'-O-methylguanosine-3'-phosphate
  modified_base 7: mod_base = OTHER; note = 2'-deoxy-2'-fluoroadenosine-3'-phosphate
  modified_base 8: mod_base = OTHER; note = 2'-O-methylguanosine-3'-phosphate
  modified_base 9: mod_base = OTHER; note = 2'-deoxy-2'-fluorouridine-3'-phosphate
  modified_base 10: mod_base = OTHER; note = 2'-deoxy-2'-fluorocytidine-3'-phosphate
  modified_base 11: mod_base = OTHER; note = 2'-deoxy-2'-fluorouridine-3'-phosphate
  modified_base 12: mod_base = OTHER; note = 2'-O-methyluridine-3'-phosphate
  modified_base 13: mod_base = OTHER; note = 2'-O-methyluridine-3'-phosphate
  modified_base 14: mod_base = OTHER; note = 2'-O-methyluridine-3'-phosphate
  modified_base 15: mod_base = OTHER; note = 2'-O-methylguanosine-3'-phosphate
  modified_base 16: mod_base = OTHER; note = 2'-O-methyluridine-3'-phosphate
  modified_base 17: mod_base = OTHER; note = 2'-O-methyluridine-3'-phosphate
  modified_base 18: mod_base = OTHER; note = 2'-O-methyladenosine-3'-phosphate
  modified_base 19: mod_base = OTHER; note = 2'-O-methylguanosine-3'-phosphate
  modified_base 20: mod_base = OTHER; note = 2'-O-methyluridine-3'-phosphate
  modified_base 21: mod_base = OTHER; note = 2'-O-methyluridine-3'-phosphate ((2S,4R)-1-[29-[[2-(acetylamino)-2-deoxy-beta-D-galactopyra nosyl]oxy]-14,14-bis[[3-[[3-[[5-[[2-(acetylamino)-2-deoxy-b eta-D-galactopyranosyl]oxy]-1-oxopentyl]amino]propyl]amino] -3-oxopropoxy]methyl]-1,12,19,25-tetraoxo-16-oxa-13,20,24-t riazanonacos-1-yl]-4-hydroxy-2-pyrrolidinyl)methyl ester
tgaaagagtcttttgttagtt

SEQ ID NO: 72 - RNA, 23 nt, synthetic construct
  source 1..23: mol_type = other RNA
  modified_base 1: mod_base = OTHER; note = 2'-O-methyladenosine-3'-phosphorothioate
  modified_base 2: mod_base = OTHER; note = 2'-deoxy-2'-fluoroadenosine-3'-phosphorothioate
  modified_base 3: mod_base = OTHER; note = 2'-O-methylcytidine-3'-phosphate
  modified_base 4: mod_base = OTHER; note = 2'-O-methyluridine-3'-phosphate
  modified_base 5: mod_base = OTHER; note = 2'-O-methyladenosine-3'-phosphate
  modified_base 6: mod_base = OTHER; note = 2'-deoxy-2'-fluoroadenosine-3'-phosphate
  modified_base 7: mod_base = OTHER; note = 2'-O-methylcytidine-3'-phosphate
  modified_base 8: mod_base = OTHER; note = 2'-deoxy-2'-fluoroadenosine-3'-phosphate
  modified_base 9: mod_base = OTHER; note = 2'-deoxy-2'-fluoroadenosine-3'-phosphate
  modified_base 10: mod_base = OTHER; note = 2'-O-methyladenosine-3'-phosphate
  modified_base 11: mod_base = OTHER; note = 2'-O-methyladenosine-3'-phosphate
  modified_base 12: mod_base = OTHER; note = 2'-O-methylguanosine-3'-phosphate
  modified_base 13: mod_base = OTHER; note = 2'-O-methyladenosine-3'-phosphate
  modified_base 14: mod_base = OTHER; note = 2'-deoxy-2'-fluorocytidine-3'-phosphate
  modified_base 15: mod_base = OTHER; note = 2'-O-methyluridine-3'-phosphate
  modified_base 16: mod_base = OTHER; note = 2'-deoxy-2'-fluorocytidine-3'-phosphate
  modified_base 17: mod_base = OTHER; note = 2'-O-methyluridine-3'-phosphate
  modified_base 18: mod_base = OTHER; note = 2'-O-methyluridine-3'-phosphate
  modified_base 19: mod_base = OTHER; note = 2'-O-methyluridine-3'-phosphate
  modified_base 20: mod_base = OTHER; note = 2'-O-methylcytidine-3'-phosphate
  modified_base 21: mod_base = OTHER; note = 2'-O-methyladenosine-3'-phosphorothioate
  modified_base 22: mod_base = OTHER; note = 2'-O-methylcytidine-3'-phosphorothioate
  modified_base 23: mod_base = OTHER; note = 2'-O-methyladenosine
aactaacaaaagactctttcaca

SEQ ID NO: 73 - RNA, 21 nt, synthetic construct
  source 1..21: mol_type = other RNA
  modified_base 1: mod_base = OTHER; note = 2'-O-methyladenosine-3'-phosphorothioate
  modified_base 2: mod_base = OTHER; note = 2'-O-methyladenosine-3'-phosphorothioate
  modified_base 3: mod_base = OTHER; note = 2'-O-methyladenosine-3'-phosphate
  modified_base 4: mod_base = OTHER; note = 2'-O-methylguanosine-3'-phosphate
  modified_base 5: mod_base = OTHER; note = 2'-O-methyladenosine-3'-phosphate
  modified_base 6: mod_base = OTHER; note = 2'-O-methylguanosine-3'-phosphate
  modified_base 7: mod_base = OTHER; note = 2'-deoxy-2'-fluorouridine-3'-phosphate
  modified_base 8: mod_base = OTHER; note = 2'-O-methylcytidine-3'-phosphate
  modified_base 9: mod_base = OTHER; note = 2'-deoxy-2'-fluorouridine-3'-phosphate
  modified_base 10: mod_base = OTHER; note = 2'-deoxy-2'-fluorouridine-3'-phosphate
  modified_base 11: mod_base = OTHER; note = 2'-deoxy-2'-fluorouridine-3'-phosphate
  modified_base 12: mod_base = OTHER; note = 2'-O-methyluridine-3'-phosphate
  modified_base 13: mod_base = OTHER; note = 2'-O-methylguanosine-3'-phosphate
  modified_base 14: mod_base = OTHER; note = 2'-O-methyluridine-3'-phosphate
  modified_base 15: mod_base = OTHER; note = 2'-O-methyluridine-3'-phosphate
  modified_base 16: mod_base = OTHER; note = 2'-O-methyladenosine-3'-phosphate
  modified_base 17: mod_base = OTHER; note = 2'-O-methylguanosine-3'-phosphate
  modified_base 18: mod_base = OTHER; note = 2'-O-methyluridine-3'-phosphate
  modified_base 19: mod_base = OTHER; note = 2'-O-methylcytidine-3'-phosphate
  modified_base 20: mod_base = OTHER; note = 2'-O-methyluridine-3'-phosphate
  modified_base 21: mod_base = OTHER; note = 2'-O-methyluridine-3'-phosphate ((2S,4R)-1-[29-[[2-(acetylamino)-2-deoxy-beta-D-galactopyra nosyl]oxy]-14,14-bis[[3-[[3-[[5-[[2-(acetylamino)-2-deoxy-b eta-D-galactopyranosyl]oxy]-1-oxopentyl]amino]propyl]amino] -3-oxopropoxy]methyl]-1,12,19,25-tetraoxo-16-oxa-13,20,24-t riazanonacos-1-yl]-4-hydroxy-2-pyrrolidinyl)methyl ester
aaagagtcttttgttagtctt

SEQ ID NO: 74 - RNA, 23 nt, synthetic construct
  source 1..23: mol_type = other RNA
  modified_base 1: mod_base = OTHER; note = 2'-O-methyladenosine-3'-phosphorothioate
  modified_base 2: mod_base = OTHER; note = 2'-deoxy-2'-fluoroadenosine-3'-phosphorothioate
  modified_base 3: mod_base = OTHER; note = 2'-O-methylguanosine-3'-phosphate
  modified_base 4: mod_base = OTHER; note = 2'-O-methyladenosine-3'-phosphate
  modified_base 5: mod_base = OTHER; note = 2'-O-methylcytidine-3'-phosphate
  modified_base 6: mod_base = OTHER; note = 2'-deoxy-2'-fluorouridine-3'-phosphate
  modified_base 7: mod_base = OTHER; note = 2'-O-methyladenosine-3'-phosphate
  modified_base 8: mod_base = OTHER; note = 2'-deoxy-2'-fluoroadenosine-3'-phosphate
  modified_base 9: mod_base = OTHER; note = 2'-deoxy-2'-fluorocytidine-3'-phosphate
  modified_base 10: mod_base = OTHER; note = 2'-O-methyladenosine-3'-phosphate
  modified_base 11: mod_base = OTHER; note = 2'-O-methyladenosine-3'-phosphate
  modified_base 12: mod_base = OTHER; note = 2'-O-methyladenosine-3'-phosphate
  modified_base 13: mod_base = OTHER; note = 2'-O-methyladenosine-3'-phosphate
  modified_base 14: mod_base = OTHER; note = 2'-deoxy-2'-fluoroguanosine-3'-phosphate
  modified_base 15: mod_base = OTHER; note = 2'-O-methyladenosine-3'-phosphate
  modified_base 16: mod_base = OTHER; note = 2'-deoxy-2'-fluorocytidine-3'-phosphate
  modified_base 17: mod_base = OTHER; note = 2'-O-methyluridine-3'-phosphate
  modified_base 18: mod_base = OTHER; note = 2'-O-methylcytidine-3'-phosphate
  modified_base 19: mod_base = OTHER; note = 2'-O-methyluridine-3'-phosphate
  modified_base 20: mod_base = OTHER; note = 2'-O-methyluridine-3'-phosphate
  modified_base 21: mod_base = OTHER; note = 2'-O-methyluridine-3'-phosphorothioate
  modified_base 22: mod_base = OTHER; note = 2'-O-methylcytidine-3'-phosphorothioate
  modified_base 23: mod_base = OTHER; note = 2'-O-methyladenosine
aagactaacaaaagactctttca

SEQ ID NO: 75 - RNA, 21 nt, synthetic construct
  source 1..21: mol_type = other RNA
  modified_base 1: mod_base = OTHER; note = 2'-O-methyluridine-3'-phosphorothioate
  modified_base 2: mod_base = OTHER; note = 2'-O-methyluridine-3'-phosphorothioate
  modified_base 3: mod_base = OTHER; note = 2'-O-methyluridine-3'-phosphate
  modified_base 4: mod_base = OTHER; note = 2'-O-methyluridine-3'-phosphate
  modified_base 5: mod_base = OTHER; note = 2'-O-methylguanosine-3'-phosphate
  modified_base 6: mod_base = OTHER; note = 2'-O-methyladenosine-3'-phosphate
  modified_base 7: mod_base = OTHER; note = 2'-deoxy-2'-fluoroguanosine-3'-phosphate
  modified_base 8: mod_base = OTHER; note = 2'-O-methyladenosine-3'-phosphate
  modified_base 9: mod_base = OTHER; note = 2'-deoxy-2'-fluoroadenosine-3'-phosphate
  modified_base 10: mod_base = OTHER; note = 2'-deoxy-2'-fluorouridine-3'-phosphate
  modified_base 11: mod_base = OTHER; note = 2'-deoxy-2'-fluoroguanosine-3'-phosphate
  modified_base 12: mod_base = OTHER; note = 2'-O-methyladenosine-3'-phosphate
  modified_base 13: mod_base = OTHER; note = 2'-O-methyluridine-3'-phosphate
  modified_base 14: mod_base = OTHER; note = 2'-O-methyluridine-3'-phosphate
  modified_base 15: mod_base = OTHER; note = 2'-O-methylcytidine-3'-phosphate
  modified_base 16: mod_base = OTHER; note = 2'-O-methyluridine-3'-phosphate
  modified_base 17: mod_base = OTHER; note = 2'-O-methyluridine-3'-phosphate
  modified_base 18: mod_base = OTHER; note = 2'-O-methyluridine-3'-phosphate
  modified_base 19: mod_base = OTHER; note = 2'-O-methylcytidine-3'-phosphate
  modified_base 20: mod_base = OTHER; note = 2'-O-methylcytidine-3'-phosphate
  modified_base 21: mod_base = OTHER; note = 2'-O-methyluridine-3'-phosphate ((2S,4R)-1-[29-[[2-(acetylamino)-2-deoxy-beta-D-galactopyra nosyl]oxy]-14,14-bis[[3-[[3-[[5-[[2-(acetylamino)-2-deoxy-b eta-D-galactopyranosyl]oxy]-1-oxopentyl]amino]propyl]amino] -3-oxopropoxy]methyl]-1,12,19,25-tetraoxo-16-oxa-13,20,24-t riazanonacos-1-yl]-4-hydroxy-2-pyrrolidinyl)methyl ester
ttttgagaatgattctttcct

SEQ ID NO: 76 - RNA, 23 nt, synthetic construct
  source 1..23: mol_type = other RNA
  modified_base 1: mod_base = OTHER; note = 2'-O-methyladenosine-3'-phosphorothioate
  modified_base 2: mod_base = OTHER; note = 2'-deoxy-2'-fluoroguanosine-3'-phosphorothioate
  modified_base 3: mod_base = OTHER; note = 2'-O-methylguanosine-3'-phosphate
  modified_base 4: mod_base = OTHER; note = 2'-O-methyladenosine-3'-phosphate
  modified_base 5: mod_base = OTHER; note = 2'-O-methyladenosine-3'-phosphate
  modified_base 6: mod_base = OTHER; note = 2'-deoxy-2'-fluoroadenosine-3'-phosphate
  modified_base 7: mod_base = OTHER; note = 2'-O-methylguanosine-3'-phosphate
  modified_base 8: mod_base = OTHER; note = 2'-deoxy-2'-fluoroadenosine-3'-phosphate
  modified_base 9: mod_base = OTHER; note = 2'-deoxy-2'-fluoroadenosine-3'-phosphate
  modified_base 10: mod_base = OTHER; note = 2'-O-methyluridine-3'-phosphate
  modified_base 11: mod_base = OTHER; note = 2'-O-methylcytidine-3'-phosphate
  modified_base 12: mod_base = OTHER; note = 2'-O-methyladenosine-3'-phosphate
  modified_base 13: mod_base = OTHER; note = 2'-O-methyluridine-3'-phosphate
  modified_base 14: mod_base = OTHER; note = 2'-deoxy-2'-fluorouridine-3'-phosphate
  modified_base 15: mod_base = OTHER; note = 2'-O-methylcytidine-3'-phosphate
  modified_base 16: mod_base = OTHER; note = 2'-deoxy-2'-fluorouridine-3'-phosphate
  modified_base 17: mod_base = OTHER; note = 2'-O-methylcytidine-3'-phosphate
  modified_base 18: mod_base = OTHER; note = 2'-O-methyladenosine-3'-phosphate
  modified_base 19: mod_base = OTHER; note = 2'-O-methyladenosine-3'-phosphate
  modified_base 20: mod_base = OTHER; note = 2'-O-methyladenosine-3'-phosphate
  modified_base 21: mod_base = OTHER; note = 2'-O-methyladenosine-3'-phosphorothioate
  modified_base 22: mod_base = OTHER; note = 2'-O-methyladenosine-3'-phosphorothioate
  modified_base 23: mod_base = OTHER; note = 2'-O-methylcytidine
aggaaagaatcattctcaaaaac

SEQ ID NO: 77 - RNA, 21 nt, synthetic construct
  source 1..21: mol_type = other RNA
  modified_base 1: mod_base = OTHER; note = 2'-O-methyluridine-3'-phosphorothioate
  modified_base 2: mod_base = OTHER; note = 2'-O-methyluridine-3'-phosphorothioate
  modified_base 3: mod_base = OTHER; note = 2'-O-methyluridine-3'-phosphate
  modified_base 4: mod_base = OTHER; note = 2'-O-methylguanosine-3'-phosphate
  modified_base 5: mod_base = OTHER; note = 2'-O-methyladenosine-3'-phosphate
  modified_base 6: mod_base = OTHER; note = 2'-O-methylguanosine-3'-phosphate
  modified_base 7: mod_base = OTHER; note = 2'-deoxy-2'-fluoroadenosine-3'-phosphate
  modified_base 8: mod_base = OTHER; note = 2'-O-methyladenosine-3'-phosphate
  modified_base 9: mod_base = OTHER; note = 2'-deoxy-2'-fluorouridine-3'-phosphate
  modified_base 10: mod_base = OTHER; note = 2'-deoxy-2'-fluoroguanosine-3'-phosphate
  modified_base 11: mod_base = OTHER; note = 2'-deoxy-2'-fluoroadenosine-3'-phosphate
  modified_base 12: mod_base = OTHER; note = 2'-O-methyluridine-3'-phosphate
  modified_base 13: mod_base = OTHER; note = 2'-O-methyluridine-3'-phosphate
  modified_base 14: mod_base = OTHER; note = 2'-O-methylcytidine-3'-phosphate
  modified_base 15: mod_base = OTHER; note = 2'-O-methyluridine-3'-phosphate
  modified_base 16: mod_base = OTHER; note = 2'-O-methyluridine-3'-phosphate
  modified_base 17: mod_base = OTHER; note = 2'-O-methyluridine-3'-phosphate
  modified_base 18: mod_base = OTHER; note = 2'-O-methylcytidine-3'-phosphate
  modified_base 19: mod_base = OTHER; note = 2'-O-methylcytidine-3'-phosphate
  modified_base 20: mod_base = OTHER; note = 2'-O-methyluridine-3'-phosphate
  modified_base 21: mod_base = OTHER; note = 2'-O-methyluridine-3'-phosphate ((2S,4R)-1-[29-[[2-(acetylamino)-2-deoxy-beta-D-galactopyra nosyl]oxy]-14,14-bis[[3-[[3-[[5-[[2-(acetylamino)-2-deoxy-b eta-D-galactopyranosyl]oxy]-1-oxopentyl]amino]propyl]amino] -3-oxopropoxy]methyl]-1,12,19,25-tetraoxo-16-oxa-13,20,24-t riazanonacos-1-yl]-4-hydroxy-2-pyrrolidinyl)methyl ester
tttgagaatgattctttcctt

SEQ ID NO: 78 - RNA, 23 nt, synthetic construct
  source 1..23: mol_type = other RNA
  modified_base 1: mod_base = OTHER; note = 2'-O-methyladenosine-3'-phosphorothioate
  modified_base 2: mod_base = OTHER; note = 2'-deoxy-2'-fluoroadenosine-3'-phosphorothioate
  modified_base 3: mod_base = OTHER; note = 2'-O-methylguanosine-3'-phosphate
  modified_base 4: mod_base = OTHER; note = 2'-O-methylguanosine-3'-phosphate
  modified_base 5: mod_base = OTHER; note = 2'-O-methyladenosine-3'-phosphate
  modified_base 6: mod_base = OTHER; note = 2'-deoxy-2'-fluoroadenosine-3'-phosphate
  modified_base 7: mod_base = OTHER; note = 2'-O-methyladenosine-3'-phosphate
  modified_base 8: mod_base = OTHER; note = 2'-deoxy-2'-fluoroguanosine-3'-phosphate
  modified_base 9: mod_base = OTHER; note = 2'-deoxy-2'-fluoroadenosine-3'-phosphate
  modified_base 10: mod_base = OTHER; note = 2'-O-methyladenosine-3'-phosphate
  modified_base 11: mod_base = OTHER; note = 2'-O-methyluridine-3'-phosphate
  modified_base 12: mod_base = OTHER; note = 2'-O-methylcytidine-3'-phosphate
  modified_base 13: mod_base = OTHER; note = 2'-O-methyladenosine-3'-phosphate
  modified_base 14: mod_base = OTHER; note = 2'-deoxy-2'-fluorouridine-3'-phosphate
  modified_base 15: mod_base = OTHER; note = 2'-O-methyluridine-3'-phosphate
  modified_base 16: mod_base = OTHER; note = 2'-deoxy-2'-fluorocytidine-3'-phosphate
  modified_base 17: mod_base = OTHER; note = 2'-O-methyluridine-3'-phosphate
  modified_base 18: mod_base = OTHER; note = 2'-O-methylcytidine-3'-phosphate
  modified_base 19: mod_base = OTHER; note = 2'-O-methyladenosine-3'-phosphate
  modified_base 20: mod_base = OTHER; note = 2'-O-methyladenosine-3'-phosphate
  modified_base 21: mod_base = OTHER; note = 2'-O-methyladenosine-3'-phosphorothioate
  modified_base 22: mod_base = OTHER; note = 2'-O-methyladenosine-3'-phosphorothioate
  modified_base 23: mod_base = OTHER; note = 2'-O-methyladenosine
aaggaaagaatcattctcaaaaa

SEQ ID NO: 79 - RNA, 21 nt, synthetic construct
  source 1..21: mol_type = other RNA
  modified_base 1: mod_base = OTHER; note = 2'-O-methylguanosine-3'-phosphorothioate
  modified_base 2: mod_base = OTHER; note = 2'-O-methyluridine-3'-phosphorothioate
  modified_base 3: mod_base = OTHER; note = 2'-O-methylguanosine-3'-phosphate
  modified_base 4: mod_base = OTHER; note = 2'-O-methyluridine-3'-phosphate
  modified_base 5: mod_base = OTHER; note = 2'-O-methylguanosine-3'-phosphate
  modified_base 6: mod_base = OTHER; note = 2'-O-methyladenosine-3'-phosphate
  modified_base 7: mod_base = OTHER; note = 2'-deoxy-2'-fluorouridine-3'-phosphate
  modified_base 8: mod_base = OTHER; note = 2'-O-methylcytidine-3'-phosphate
  modified_base 9: mod_base = OTHER; note = 2'-deoxy-2'-fluoroadenosine-3'-phosphate
  modified_base 10: mod_base = OTHER; note = 2'-deoxy-2'-fluoroadenosine-3'-phosphate
  modified_base 11: mod_base = OTHER; note = 2'-deoxy-2'-fluoroadenosine-3'-phosphate
  modified_base 12: mod_base = OTHER; note = 2'-O-methyladenosine-3'-phosphate
  modified_base 13: mod_base = OTHER; note = 2'-O-methylcytidine-3'-phosphate
  modified_base 14: mod_base = OTHER; note = 2'-O-methyladenosine-3'-phosphate
  modified_base 15: mod_base = OTHER; note = 2'-O-methyluridine-3'-phosphate
  modified_base 16: mod_base = OTHER; note = 2'-O-methyladenosine-3'-phosphate
  modified_base 17: mod_base = OTHER; note = 2'-O-methylcytidine-3'-phosphate
  modified_base 18: mod_base = OTHER; note = 2'-O-methyladenosine-3'-phosphate
  modified_base 19: mod_base = OTHER; note = 2'-O-methyladenosine-3'-phosphate
  modified_base 20: mod_base = OTHER; note = 2'-O-methylguanosine-3'-phosphate
  modified_base 21: mod_base = OTHER; note = 2'-O-methyluridine-3'-phosphate ((2S,4R)-1-[29-[[2-(acetylamino)-2-deoxy-beta-D-galactopyra nosyl]oxy]-14,14-bis[[3-[[3-[[5-[[2-(acetylamino)-2-deoxy-b eta-D-galactopyranosyl]oxy]-1-oxopentyl]amino]propyl]amino] -3-oxopropoxy]methyl]-1,12,19,25-tetraoxo-16-oxa-13,20,24-t riazanonacos-1-yl]-4-hydroxy-2-pyrrolidinyl)methyl ester
gtgtgatcaaaacatacaagt

SEQ ID NO: 80 - RNA, 23 nt, synthetic construct
  source 1..23: mol_type = other RNA
  modified_base 1: mod_base = OTHER; note = 2'-O-methyladenosine-3'-phosphorothioate
  modified_base 2: mod_base = OTHER; note = 2'-deoxy-2'-fluorocytidine-3'-phosphorothioate
  modified_base 3: mod_base = OTHER; note = 2'-O-methyluridine-3'-phosphate
  modified_base 4: mod_base = OTHER; note = 2'-O-methyluridine-3'-phosphate
  modified_base 5: mod_base = OTHER; note = 2'-O-methylguanosine-3'-phosphate
  modified_base 6: mod_base = OTHER; note = 2'-deoxy-2'-fluorouridine-3'-phosphate
  modified_base 7: mod_base = OTHER; note = 2'-O-methyladenosine-3'-phosphate
  modified_base 8: mod_base = OTHER; note = 2'-deoxy-2'-fluorouridine-3'-phosphate
  modified_base 9: mod_base = OTHER; note = 2'-deoxy-2'-fluoroguanosine-3'-phosphate
  modified_base 10: mod_base = OTHER; note = 2'-O-methyluridine-3'-phosphate
  modified_base 11: mod_base = OTHER; note = 2'-O-methyluridine-3'-phosphate
  modified_base 12: mod_base = OTHER; note = 2'-O-methyluridine-3'-phosphate
  modified_base 13: mod_base = OTHER; note = 2'-O-methyluridine-3'-phosphate
  modified_base 14: mod_base = OTHER; note = 2'-deoxy-2'-fluoroguanosine-3'-phosphate
  modified_base 15: mod_base = OTHER; note = 2'-O-methyladenosine-3'-phosphate
  modified_base 16: mod_base = OTHER; note = 2'-deoxy-2'-fluorouridine-3'-phosphate
  modified_base 17: mod_base = OTHER; note = 2'-O-methylcytidine-3'-phosphate
  modified_base 18: mod_base = OTHER; note = 2'-O-methyladenosine-3'-phosphate
  modified_base 19: mod_base = OTHER; note = 2'-O-methylcytidine-3'-phosphate
  modified_base 20: mod_base = OTHER; note = 2'-O-methyladenosine-3'-phosphate
  modified_base 21: mod_base = OTHER; note = 2'-O-methylcytidine-3'-phosphorothioate
  modified_base 22: mod_base = OTHER; note = 2'-O-methylguanosine-3'-phosphorothioate
  modified_base 23: mod_base = OTHER; note = 2'-O-methylcytidine
acttgtatgttttgatcacacgc

SEQ ID NO: 81 - RNA, 21 nt, synthetic construct
  source 1..21: mol_type = other RNA
  modified_base 1: mod_base = OTHER; note = 2'-O-methylcytidine-3'-phosphorothioate
  modified_base 2: mod_base = OTHER; note = 2'-O-methyluridine-3'-phosphorothioate
  modified_base 3: mod_base = OTHER; note = 2'-O-methylguanosine-3'-phosphate
  modified_base 4: mod_base = OTHER; note = 2'-O-methylguanosine-3'-phosphate
  modified_base 5: mod_base = OTHER; note = 2'-O-methylcytidine-3'-phosphate
  modified_base 6: mod_base = OTHER; note = 2'-O-methyluridine-3'-phosphate
  modified_base 7: mod_base = OTHER; note = 2'-deoxy-2'-fluoroguanosine-3'-phosphate
  modified_base 8: mod_base = OTHER; note = 2'-O-methyluridine-3'-phosphate
  modified_base 9: mod_base = OTHER; note = 2'-deoxy-2'-fluorouridine-3'-phosphate
  modified_base 10: mod_base = OTHER; note = 2'-deoxy-2'-fluorocytidine-3'-phosphate
  modified_base 11: mod_base = OTHER; note = 2'-deoxy-2'-fluorocytidine-3'-phosphate
  modified_base 12: mod_base = OTHER; note = 2'-O-methylcytidine-3'-phosphate
  modified_base 13: mod_base = OTHER; note = 2'-O-methyladenosine-3'-phosphate
  modified_base 14: mod_base = OTHER; note = 2'-O-methylcytidine-3'-phosphate
  modified_base 15: mod_base = OTHER; note = 2'-O-methyluridine-3'-phosphate
  modified_base 16: mod_base = OTHER; note = 2'-O-methyluridine-3'-phosphate
  modified_base 17: mod_base = OTHER; note = 2'-O-methyladenosine-3'-phosphate
  modified_base 18: mod_base = OTHER; note = 2'-O-methylcytidine-3'-phosphate
  modified_base 19: mod_base = OTHER; note = 2'-O-methyluridine-3'-phosphate
  modified_base 20: mod_base = OTHER; note = 2'-O-methylguanosine-3'-phosphate
  modified_base 21: mod_base = OTHER; note = 2'-O-methyluridine-3'-phosphate ((2S,4R)-1-[29-[[2-(acetylamino)-2-deoxy-beta-D-galactopyra nosyl]oxy]-14,14-bis[[3-[[3-[[5-[[2-(acetylamino)-2-deoxy-b eta-D-galactopyranosyl]oxy]-1-oxopentyl]amino]propyl]amino] -3-oxopropoxy]methyl]-1,12,19,25-tetraoxo-16-oxa-13,20,24-t riazanonacos-1-yl]-4-hydroxy-2-pyrrolidinyl)methyl ester
ctggctgttcccacttactgt

SEQ ID NO: 82 - RNA, 23 nt, synthetic construct
  source 1..23: mol_type = other RNA
  modified_base 1: mod_base = OTHER; note = 2'-O-methyladenosine-3'-phosphorothioate
  modified_base 2: mod_base = OTHER; note = 2'-deoxy-2'-fluorocytidine-3'-phosphorothioate
  modified_base 3: mod_base = OTHER; note = 2'-O-methyladenosine-3'-phosphate
  modified_base 4: mod_base = OTHER; note = 2'-O-methylguanosine-3'-phosphate
  modified_base 5: mod_base = OTHER; note = 2'-O-methyluridine-3'-phosphate
  modified_base 6: mod_base = OTHER; note = 2'-deoxy-2'-fluoroadenosine-3'-phosphate
  modified_base 7: mod_base = OTHER; note = 2'-O-methyladenosine-3'-phosphate
  modified_base 8: mod_base = OTHER; note = 2'-deoxy-2'-fluoroguanosine-3'-phosphate
  modified_base 9: mod_base = OTHER; note = 2'-deoxy-2'-fluorouridine-3'-phosphate
  modified_base 10: mod_base = OTHER; note = 2'-O-methylguanosine-3'-phosphate
  modified_base 11: mod_base = OTHER; note = 2'-O-methylguanosine-3'-phosphate
  modified_base 12: mod_base = OTHER; note = 2'-O-methylguanosine-3'-phosphate
  modified_base 13: mod_base = OTHER; note = 2'-O-methyladenosine-3'-phosphate
  modified_base 14: mod_base = OTHER; note = 2'-deoxy-2'-fluoroadenosine-3'-phosphate
  modified_base 15: mod_base = OTHER; note = 2'-O-methylcytidine-3'-phosphate
  modified_base 16: mod_base = OTHER; note = 2'-deoxy-2'-fluoroadenosine-3'-phosphate
  modified_base 17: mod_base = OTHER; note = 2'-O-methylguanosine-3'-phosphate
  modified_base 18: mod_base = OTHER; note = 2'-O-methylcytidine-3'-phosphate
  modified_base 19: mod_base = OTHER; note = 2'-O-methylcytidine-3'-phosphate
  modified_base 20: mod_base = OTHER; note = 2'-O-methyladenosine-3'-phosphate
  modified_base 21: mod_base = OTHER; note = 2'-O-methylguanosine-3'-phosphorothioate
  modified_base 22: mod_base = OTHER; note = 2'-O-methyladenosine-3'-phosphorothioate
  modified_base 23: mod_base = OTHER; note = 2'-O-methylcytidine
acagtaagtgggaacagccagac

SEQ ID NO: 83 - RNA, 21 nt, synthetic construct
  source 1..21: mol_type = other RNA
  modified_base 1: mod_base = OTHER; note = 2'-O-methylguanosine-3'-phosphorothioate
  modified_base 2: mod_base = OTHER; note = 2'-O-methyladenosine-3'-phosphorothioate
  modified_base 3: mod_base = OTHER; note = 2'-O-methyladenosine-3'-phosphate
  modified_base 4: mod_base = OTHER; note = 2'-O-methylguanosine-3'-phosphate
  modified_base 5: mod_base = OTHER; note = 2'-O-methyladenosine-3'-phosphate
  modified_base 6: mod_base = OTHER; note = 2'-O-methyladenosine-3'-phosphate
  modified_base 7: mod_base = OTHER; note = 2'-deoxy-2'-fluorocytidine-3'-phosphate
  modified_base 8: mod_base = OTHER; note = 2'-O-methyladenosine-3'-phosphate
  modified_base 9: mod_base = OTHER; note = 2'-deoxy-2'-fluorouridine-3'-phosphate
  modified_base 10: mod_base = OTHER; note = 2'-deoxy-2'-fluoroguanosine-3'-phosphate
  modified_base 11: mod_base = OTHER; note = 2'-deoxy-2'-fluorocytidine-3'-phosphate
  modified_base 12: mod_base = OTHER; note = 2'-O-methyluridine-3'-phosphate
  modified_base 13: mod_base = OTHER; note = 2'-O-methylcytidine-3'-phosphate
  modified_base 14: mod_base = OTHER; note = 2'-O-methyladenosine-3'-phosphate
  modified_base 15: mod_base = OTHER; note = 2'-O-methyluridine-3'-phosphate
  modified_base 16: mod_base = OTHER; note = 2'-O-methyluridine-3'-phosphate
  modified_base 17: mod_base = OTHER; note = 2'-O-methylguanosine-3'-phosphate
  modified_base 18: mod_base = OTHER; note = 2'-O-methylcytidine-3'-phosphate
  modified_base 19: mod_base = OTHER; note = 2'-O-methylcytidine-3'-phosphate
  modified_base 20: mod_base = OTHER; note = 2'-O-methyluridine-3'-phosphate
  modified_base 21: mod_base = OTHER; note = 2'-O-methyluridine-3'-phosphate ((2S,4R)-1-[29-[[2-(acetylamino)-2-deoxy-beta-D-galactopyra nosyl]oxy]-14,14-bis[[3-[[3-[[5-[[2-(acetylamino)-2-deoxy-b eta-D-galactopyranosyl]oxy]-1-oxopentyl]amino]propyl]amino] -3-oxopropoxy]methyl]-1,12,19,25-tetraoxo-16-oxa-13,20,24-t riazanonacos-1-yl]-4-hydroxy-2-pyrrolidinyl)methyl ester
gaagaacatgctcattgcctt

SEQ ID NO: 84 - RNA, 23 nt, synthetic construct
  source 1..23: mol_type = other RNA
  modified_base 1: mod_base = OTHER; note = 2'-O-methyladenosine-3'-phosphorothioate
  modified_base 2: mod_base = OTHER; note = 2'-deoxy-2'-fluoroadenosine-3'-phosphorothioate
  modified_base 3: mod_base = OTHER; note = 2'-O-methylguanosine-3'-phosphate
  modified_base 4: mod_base = OTHER; note = 2'-O-methylguanosine-3'-phosphate
  modified_base 5: mod_base = OTHER; note = 2'-O-methylcytidine-3'-phosphate
  modified_base 6: mod_base = OTHER; note = 2'-deoxy-2'-fluoroadenosine-3'-phosphate
  modified_base 7: mod_base = OTHER; note = 2'-O-methyladenosine-3'-phosphate
  modified_base 8: mod_base = OTHER; note = 2'-deoxy-2'-fluorouridine-3'-phosphate
  modified_base 9: mod_base = OTHER; note = 2'-deoxy-2'-fluoroguanosine-3'-phosphate
  modified_base 10: mod_base = OTHER; note = 2'-O-methyladenosine-3'-phosphate
  modified_base 11: mod_base = OTHER; note = 2'-O-methylguanosine-3'-phosphate
  modified_base 12: mod_base = OTHER; note = 2'-O-methylcytidine-3'-phosphate
  modified_base 13: mod_base = OTHER; note = 2'-O-methyladenosine-3'-phosphate
  modified_base 14: mod_base = OTHER; note = 2'-deoxy-2'-fluorouridine-3'-phosphate
  modified_base 15: mod_base = OTHER; note = 2'-O-methylguanosine-3'-phosphate
  modified_base 16: mod_base = OTHER; note = 2'-deoxy-2'-fluorouridine-3'-phosphate
  modified_base 17: mod_base = OTHER; note = 2'-O-methyluridine-3'-phosphate
  modified_base 18: mod_base = OTHER; note = 2'-O-methylcytidine-3'-phosphate
  modified_base 19: mod_base = OTHER; note = 2'-O-methyluridine-3'-phosphate
  modified_base 20: mod_base = OTHER; note = 2'-O-methyluridine-3'-phosphate
  modified_base 21: mod_base = OTHER; note = 2'-O-methylcytidine-3'-phosphorothioate
  modified_base 22: mod_base = OTHER; note = 2'-O-methyladenosine-3'-phosphorothioate
  modified_base 23: mod_base = OTHER; note = 2'-O-methylcytidine
aaggcaatgagcatgttcttcac

SEQ ID NO: 85 - RNA, 21 nt, synthetic construct
  source 1..21: mol_type = other RNA
  modified_base 1: mod_base = OTHER; note = 2'-O-methylguanosine-3'-phosphorothioate
  modified_base 2: mod_base = OTHER; note = 2'-O-methyluridine-3'-phosphorothioate
  modified_base 3: mod_base = OTHER; note = 2'-O-methyluridine-3'-phosphate
  modified_base 4: mod_base = OTHER; note = 2'-O-methyluridine-3'-phosphate
  modified_base 5: mod_base = OTHER; note = 2'-O-methyladenosine-3'-phosphate
  modified_base 6: mod_base = OTHER; note = 2'-O-methylguanosine-3'-phosphate
  modified_base 7: mod_base = OTHER; note = 2'-deoxy-2'-fluoroadenosine-3'-phosphate
  modified_base 8: mod_base = OTHER; note = 2'-O-methyladenosine-3'-phosphate
  modified_base 9: mod_base = OTHER; note = 2'-deoxy-2'-fluoroguanosine-3'-phosphate
  modified_base 10: mod_base = OTHER; note = 2'-deoxy-2'-fluorouridine-3'-phosphate
  modified_base 11: mod_base = OTHER; note = 2'-deoxy-2'-fluoroguanosine-3'-phosphate
  modified_base 12: mod_base = OTHER; note = 2'-O-methyladenosine-3'-phosphate
  modified_base 13: mod_base = OTHER; note = 2'-O-methylcytidine-3'-phosphate
  modified_base 14: mod_base = OTHER; note = 2'-O-methyluridine-3'-phosphate
  modified_base 15: mod_base = OTHER; note = 2'-O-methyluridine-3'-phosphate
  modified_base 16: mod_base = OTHER; note = 2'-O-methyluridine-3'-phosphate
  modified_base 17: mod_base = OTHER; note = 2'-O-methylguanosine-3'-phosphate
  modified_base 18: mod_base = OTHER; note = 2'-O-methyluridine-3'-phosphate
  modified_base 19: mod_base = OTHER; note = 2'-O-methylguanosine-3'-phosphate
  modified_base 20: mod_base = OTHER; note = 2'-O-methyladenosine-3'-phosphate
  modified_base 21: mod_base = OTHER; note = 2'-O-methyluridine-3'-phosphate ((2S,4R)-1-[29-[[2-(acetylamino)-2-deoxy-beta-D-galactopyra nosyl]oxy]-14,14-bis[[3-[[3-[[5-[[2-(acetylamino)-2-deoxy-b eta-D-galactopyranosyl]oxy]-1-oxopentyl]amino]propyl]amino] -3-oxopropoxy]methyl]-1,12,19,25-tetraoxo-16-oxa-13,20,24-t riazanonacos-1-yl]-4-hydroxy-2-pyrrolidinyl)methyl ester
gtttagaagtgactttgtgat

SEQ ID NO: 86 - RNA, 23 nt, synthetic construct
  source 1..23: mol_type = other RNA
  modified_base 1: mod_base = OTHER; note = 2'-O-methyladenosine-3'-phosphorothioate
  modified_base 2: mod_base = OTHER; note = 2'-deoxy-2'-fluorouridine-3'-phosphorothioate
  modified_base 3: mod_base = OTHER; note = 2'-O-methylcytidine-3'-phosphate
  modified_base 4: mod_base = OTHER; note = 2'-O-methyladenosine-3'-phosphate
  modified_base 5: mod_base = OTHER; note = 2'-O-methylcytidine-3'-phosphate
  modified_base 6: mod_base = OTHER; note = 2'-deoxy-2'-fluoroadenosine-3'-phosphate
  modified_base 7: mod_base = OTHER; note = 2'-O-methyladenosine-3'-phosphate
  modified_base 8: mod_base = OTHER; note = 2'-deoxy-2'-fluoroadenosine-3'-phosphate
  modified_base 9: mod_base = OTHER; note = 2'-deoxy-2'-fluoroguanosine-3'-phosphate
  modified_base 10: mod_base = OTHER; note = 2'-O-methyluridine-3'-phosphate
  modified_base 11: mod_base = OTHER; note = 2'-O-methylcytidine-3'-phosphate
  modified_base 12: mod_base = OTHER; note = 2'-O-methyladenosine-3'-phosphate
  modified_base 13: mod_base = OTHER; note = 2'-O-methylcytidine-3'-phosphate
  modified_base 14: mod_base = OTHER; note = 2'-deoxy-2'-fluorouridine-3'-phosphate
  modified_base 15: mod_base = OTHER; note = 2'-O-methyluridine-3'-phosphate
  modified_base 16: mod_base = OTHER; note = 2'-deoxy-2'-fluorocytidine-3'-phosphate
  modified_base 17: mod_base = OTHER; note = 2'-O-methyluridine-3'-phosphate
  modified_base 18: mod_base = OTHER; note = 2'-O-methyladenosine-3'-phosphate
  modified_base 19: mod_base = OTHER; note = 2'-O-methyladenosine-3'-phosphate
  modified_base 20: mod_base = OTHER; note = 2'-O-methyladenosine-3'-phosphate
  modified_base 21: mod_base = OTHER; note = 2'-O-methylcytidine-3'-phosphorothioate
  modified_base 22: mod_base = OTHER; note = 2'-O-methyladenosine-3'-phosphorothioate
  modified_base 23: mod_base = OTHER; note = 2'-O-methylguanosine
atcacaaagtcacttctaaacag

SEQ ID NO: 87 - RNA, 21 nt, synthetic construct
  source 1..21: mol_type = other RNA
  modified_base 1: mod_base = OTHER; note = 2'-O-methylguanosine-3'-phosphorothioate
  modified_base 2: mod_base = OTHER; note = 2'-O-methyladenosine-3'-phosphorothioate
  modified_base 3: mod_base = OTHER; note = 2'-O-methyladenosine-3'-phosphate
  modified_base 4: mod_base = OTHER; note = 2'-O-methylguanosine-3'-phosphate
  modified_base 5: mod_base = OTHER; note = 2'-O-methyluridine-3'-phosphate
  modified_base 6: mod_base = OTHER; note = 2'-O-methylguanosine-3'-phosphate
  modified_base 7: mod_base = OTHER; note = 2'-deoxy-2'-fluoroadenosine-3'-phosphate
  modified_base 8: mod_base = OTHER; note = 2'-O-methylcytidine-3'-phosphate
  modified_base 9: mod_base = OTHER; note = 2'-deoxy-2'-fluorouridine-3'-phosphate
  modified_base 10: mod_base = OTHER; note = 2'-deoxy-2'-fluorouridine-3'-phosphate
  modified_base 11: mod_base = OTHER; note = 2'-deoxy-2'-fluorouridine-3'-phosphate
  modified_base 12: mod_base = OTHER; note = 2'-O-methylguanosine-3'-phosphate
  modified_base 13: mod_base = OTHER; note = 2'-O-methyluridine-3'-phosphate
  modified_base 14: mod_base = OTHER; note = 2'-O-methylguanosine-3'-phosphate
  modified_base 15: mod_base = OTHER; note = 2'-O-methyladenosine-3'-phosphate
  modified_base 16: mod_base = OTHER; note = 2'-O-methyladenosine-3'-phosphate
  modified_base 17: mod_base = OTHER; note = 2'-O-methylguanosine-3'-phosphate
  modified_base 18: mod_base = OTHER; note = 2'-O-methylguanosine-3'-phosphate
  modified_base 19: mod_base = OTHER; note = 2'-O-methyladenosine-3'-phosphate
  modified_base 20: mod_base = OTHER; note = 2'-O-methyluridine-3'-phosphate
  modified_base 21: mod_base = OTHER; note = 2'-O-methyluridine-3'-phosphate ((2S,4R)-1-[29-[[2-(acetylamino)-2-deoxy-beta-D-galactopyra nosyl]oxy]-14,14-bis[[3-[[3-[[5-[[2-(acetylamino)-2-deoxy-b eta-D-galactopyranosyl]oxy]-1-oxopentyl]amino]propyl]amino] -3-oxopropoxy]methyl]-1,12,19,25-tetraoxo-16-oxa-13,20,24-t riazanonacos-1-yl]-4-hydroxy-2-pyrrolidinyl)methyl ester
gaagtgactttgtgaaggatt

SEQ ID NO: 88 - RNA, 23 nt, synthetic construct
  source 1..23: mol_type = other RNA
  modified_base 1: mod_base = OTHER; note = 2'-O-methyladenosine-3'-phosphorothioate
  modified_base 2: mod_base = OTHER; note = 2'-deoxy-2'-fluoroadenosine-3'-phosphorothioate
  modified_base 3: mod_base = OTHER; note = 2'-O-methyluridine-3'-phosphate
  modified_base 4: mod_base = OTHER; note = 2'-O-methylcytidine-3'-phosphate
  modified_base 5: mod_base = OTHER; note = 2'-O-methylcytidine-3'-phosphate
  modified_base 6: mod_base = OTHER; note = 2'-deoxy-2'-fluorouridine-3'-phosphate
  modified_base 7: mod_base = OTHER; note = 2'-O-methyluridine-3'-phosphate
  modified_base 8: mod_base = OTHER; note = 2'-deoxy-2'-fluorocytidine-3'-phosphate
  modified_base 9: mod_base = OTHER; note = 2'-deoxy-2'-fluoroadenosine-3'-phosphate
  modified_base 10: mod_base = OTHER; note = 2'-O-methylcytidine-3'-phosphate
  modified_base 11: mod_base = OTHER; note = 2'-O-methyladenosine-3'-phosphate
  modified_base 12: mod_base = OTHER; note = 2'-O-methyladenosine-3'-phosphate
  modified_base 13: mod_base = OTHER; note = 2'-O-methyladenosine-3'-phosphate
  modified_base 14: mod_base = OTHER; note = 2'-deoxy-2'-fluoroguanosine-3'-phosphate
  modified_base 15: mod_base = OTHER; note = 2'-O-methyluridine-3'-phosphate
  modified_base 16: mod_base = OTHER; note = 2'-deoxy-2'-fluorocytidine-3'-phosphate
  modified_base 17: mod_base = OTHER; note = 2'-O-methyladenosine-3'-phosphate
  modified_base 18: mod_base = OTHER; note = 2'-O-methylcytidine-3'-phosphate
  modified_base 19: mod_base = OTHER; note = 2'-O-methyluridine-3'-phosphate
  modified_base 20: mod_base = OTHER; note = 2'-O-methyluridine-3'-phosphate
  modified_base 21: mod_base = OTHER; note = 2'-O-methylcytidine-3'-phosphorothioate
  modified_base 22: mod_base = OTHER; note = 2'-O-methyluridine-3'-phosphorothioate
  modified_base 23: mod_base = OTHER; note = 2'-O-methyladenosine
aatccttcacaaagtcacttcta

SEQ ID NO: 89 - RNA, 21 nt, synthetic construct
  source 1..21: mol_type = other RNA
  modified_base 1: mod_base = OTHER; note = 2'-O-methyluridine-3'-phosphorothioate
  modified_base 2: mod_base = OTHER; note = 2'-O-methylguanosine-3'-phosphorothioate
  modified_base 3: mod_base = OTHER; note = 2'-O-methyladenosine-3'-phosphate
  modified_base 4: mod_base = OTHER; note = 2'-O-methylcytidine-3'-phosphate
  modified_base 5: mod_base = OTHER; note = 2'-O-methyluridine-3'-phosphate
  modified_base 6: mod_base = OTHER; note = 2'-O-methyluridine-3'-phosphate
  modified_base 7: mod_base = OTHER; note = 2'-deoxy-2'-fluorouridine-3'-phosphate
  modified_base 8: mod_base = OTHER; note = 2'-O-methylguanosine-3'-phosphate
  modified_base 9: mod_base = OTHER; note = 2'-deoxy-2'-fluorouridine-3'-phosphate
  modified_base 10: mod_base = OTHER; note = 2'-deoxy-2'-fluoroguanosine-3'-phosphate
  modified_base 11: mod_base = OTHER; note = 2'-deoxy-2'-fluoroadenosine-3'-phosphate
  modified_base 12: mod_base = OTHER; note = 2'-O-methyladenosine-3'-phosphate
  modified_base 13: mod_base = OTHER; note = 2'-O-methylguanosine-3'-phosphate
  modified_base 14: mod_base = OTHER; note = 2'-O-methylguanosine-3'-phosphate
  modified_base 15: mod_base = OTHER; note = 2'-O-methyladenosine-3'-phosphate
  modified_base 16: mod_base = OTHER; note = 2'-O-methyluridine-3'-phosphate
  modified_base 17: mod_base = OTHER; note = 2'-O-methyluridine-3'-phosphate
  modified_base 18: mod_base = OTHER; note = 2'-O-methyladenosine-3'-phosphate
  modified_base 19: mod_base = OTHER; note = 2'-O-methylcytidine-3'-phosphate
  modified_base 20: mod_base = OTHER; note = 2'-O-methylcytidine-3'-phosphate
  modified_base 21: mod_base = OTHER; note = 2'-O-methyluridine-3'-phosphate ((2S,4R)-1-[29-[[2-(acetylamino)-2-deoxy-beta-D-galactopyra nosyl]oxy]-14,14-bis[[3-[[3-[[5-[[2-(acetylamino)-2-deoxy-b eta-D-galactopyranosyl]oxy]-1-oxopentyl]amino]propyl]amino] -3-oxopropoxy]methyl]-1,12,19,25-tetraoxo-16-oxa-13,20,24-t riazanonacos-1-yl]-4-hydroxy-2-pyrrolidinyl)methyl ester
tgactttgtgaaggattacct

SEQ ID NO: 90 - RNA, 23 nt, synthetic construct
  source 1..23: mol_type = other RNA
  modified_base 1: mod_base = OTHER; note = 2'-O-methyladenosine-3'-phosphorothioate
  modified_base 2: mod_base = OTHER; note = 2'-deoxy-2'-fluoroguanosine-3'-phosphorothioate
  modified_base 3: mod_base = OTHER; note = 2'-O-methylguanosine-3'-phosphate
  modified_base 4: mod_base = OTHER; note = 2'-O-methyluridine-3'-phosphate
  modified_base 5: mod_base = OTHER; note = 2'-O-methyladenosine-3'-phosphate
  modified_base 6: mod_base = OTHER; note = 2'-deoxy-2'-fluoroadenosine-3'-phosphate
  modified_base 7: mod_base = OTHER; note = 2'-O-methyluridine-3'-phosphate
  modified_base 8: mod_base = OTHER; note = 2'-deoxy-2'-fluorocytidine-3'-phosphate
  modified_base 9: mod_base = OTHER; note = 2'-deoxy-2'-fluorocytidine-3'-phosphate
  modified_base 10: mod_base = OTHER; note = 2'-O-methyluridine-3'-phosphate
  modified_base 11: mod_base = OTHER; note = 2'-O-methyluridine-3'-phosphate
  modified_base 12: mod_base = OTHER; note = 2'-O-methylcytidine-3'-phosphate
  modified_base 13: mod_base = OTHER; note = 2'-O-methyladenosine-3'-phosphate
  modified_base 14: mod_base = OTHER; note = 2'-deoxy-2'-fluorocytidine-3'-phosphate
  modified_base 15: mod_base = OTHER; note = 2'-O-methyladenosine-3'-phosphate
  modified_base 16: mod_base = OTHER; note = 2'-deoxy-2'-fluoroadenosine-3'-phosphate
  modified_base 17: mod_base = OTHER; note = 2'-O-methyladenosine-3'-phosphate
  modified_base 18: mod_base = OTHER; note = 2'-O-methylguanosine-3'-phosphate
  modified_base 19: mod_base = OTHER; note = 2'-O-methyluridine-3'-phosphate
  modified_base 20: mod_base = OTHER; note = 2'-O-methylcytidine-3'-phosphate
  modified_base 21: mod_base = OTHER; note = 2'-O-methyladenosine-3'-phosphorothioate
  modified_base 22: mod_base = OTHER; note = 2'-O-methylcytidine-3'-phosphorothioate
  modified_base 23: mod_base = OTHER; note = 2'-O-methyluridine
aggtaatccttcacaaagtcact

SEQ ID NO: 91 - RNA, 21 nt, synthetic construct
  source 1..21: mol_type = other RNA
  modified_base 1: mod_base = OTHER; note = 2'-O-methylguanosine-3'-phosphorothioate
  modified_base 2: mod_base = OTHER; note = 2'-O-methyladenosine-3'-phosphorothioate
  modified_base 3: mod_base = OTHER; note = 2'-O-methyladenosine-3'-phosphate
  modified_base 4: mod_base = OTHER; note = 2'-O-methyladenosine-3'-phosphate
  modified_base 5: mod_base = OTHER; note = 2'-O-methylguanosine-3'-phosphate
  modified_base 6: mod_base = OTHER; note = 2'-O-methyladenosine-3'-phosphate
  modified_base 7: mod_base = OTHER; note = 2'-deoxy-2'-fluoroguanosine-3'-phosphate
  modified_base 8: mod_base = OTHER; note = 2'-O-methyluridine-3'-phosphate
  modified_base 9: mod_base = OTHER; note = 2'-deoxy-2'-fluorocytidine-3'-phosphate
  modified_base 10: mod_base = OTHER; note = 2'-deoxy-2'-fluorouridine-3'-phosphate
  modified_base 11: mod_base = OTHER; note = 2'-deoxy-2'-fluorouridine-3'-phosphate
  modified_base 12: mod_base = OTHER; note = 2'-O-methyluridine-3'-phosphate
  modified_base 13: mod_base = OTHER; note = 2'-O-methyluridine-3'-phosphate
  modified_base 14: mod_base = OTHER; note = 2'-O-methylguanosine-3'-phosphate
  modified_base 15: mod_base = OTHER; note = 2'-O-methyluridine-3'-phosphate
  modified_base 16: mod_base = OTHER; note = 2'-O-methyluridine-3'-phosphate
  modified_base 17: mod_base = OTHER; note = 2'-O-methyladenosine-3'-phosphate
  modified_base 18: mod_base = OTHER; note = 2'-O-methylguanosine-3'-phosphate
  modified_base 19: mod_base = OTHER; note = 2'-O-methyluridine-3'-phosphate
  modified_base 20: mod_base = OTHER; note = 2'-O-methylcytidine-3'-phosphate
  modified_base 21: mod_base = OTHER; note = 2'-O-methyluridine-3'-phosphate ((2S,4R)-1-[29-[[2-(acetylamino)-2-deoxy-beta-D-galactopyra nosyl]oxy]-14,14-bis[[3-[[3-[[5-[[2-(acetylamino)-2-deoxy-b eta-D-galactopyranosyl]oxy]-1-oxopentyl]amino]propyl]amino] -3-oxopropoxy]methyl]-1,12,19,25-tetraoxo-16-oxa-13,20,24-t riazanonacos-1-yl]-4-hydroxy-2-pyrrolidinyl)methyl ester
gaaagagtcttttgttagtct

SEQ ID NO: 92 - RNA, 23 nt, synthetic construct
  source 1..23: mol_type = other RNA
  modified_base 1: mod_base = OTHER; note = 2'-O-methyladenosine-3'-phosphorothioate
  modified_base 2: mod_base = OTHER; note = 2'-deoxy-2'-fluoroguanosine-3'-phosphorothioate
  modified_base 3: mod_base = OTHER; note = 2'-O-methyladenosine-3'-phosphate
  modified_base 4: mod_base = OTHER; note = 2'-O-methylcytidine-3'-phosphate
  modified_base 5: mod_base = OTHER; note = 2'-O-methyluridine-3'-phosphate
  modified_base 6: mod_base = OTHER; note = 2'-deoxy-2'-fluoroadenosine-3'-phosphate
  modified_base 7: mod_base = OTHER; note = 2'-O-methyladenosine-3'-phosphate
  modified_base 8: mod_base = OTHER; note = 2'-deoxy-2'-fluorocytidine-3'-phosphate
  modified_base 9: mod_base = OTHER; note = 2'-deoxy-2'-fluoroadenosine-3'-phosphate
  modified_base 10: mod_base = OTHER; note = 2'-O-methyladenosine-3'-phosphate
  modified_base 11: mod_base = OTHER; note = 2'-O-methyladenosine-3'-phosphate
  modified_base 12: mod_base = OTHER; note = 2'-O-methyladenosine-3'-phosphate
  modified_base 13: mod_base = OTHER; note = 2'-O-methylguanosine-3'-phosphate
  modified_base 14: mod_base = OTHER; note = 2'-deoxy-2'-fluoroadenosine-3'-phosphate
  modified_base 15: mod_base = OTHER; note = 2'-O-methylcytidine-3'-phosphate
  modified_base 16: mod_base = OTHER; note = 2'-deoxy-2'-fluorouridine-3'-phosphate
  modified_base 17: mod_base = OTHER; note = 2'-O-methylcytidine-3'-phosphate
  modified_base 18: mod_base = OTHER; note = 2'-O-methyluridine-3'-phosphate
  modified_base 19: mod_base = OTHER; note = 2'-O-methyluridine-3'-phosphate
  modified_base 20: mod_base = OTHER; note = 2'-O-methyluridine-3'-phosphate
  modified_base 21: mod_base = OTHER; note = 2'-O-methylcytidine-3'-phosphorothioate
  modified_base 22: mod_base = OTHER; note = 2'-O-methyladenosine-3'-phosphorothioate
  modified_base 23: mod_base = OTHER; note = 2'-O-methylcytidine
agactaacaaaagactctttcac

SEQ ID NO: 93 - RNA, 21 nt, synthetic construct
  source 1..21: mol_type = other RNA
  modified_base 1: mod_base = OTHER; note = 2'-O-methyluridine-3'-phosphorothioate
  modified_base 2: mod_base = OTHER; note = 2'-O-methyluridine-3'-phosphorothioate
  modified_base 3: mod_base = OTHER; note = 2'-O-methylguanosine-3'-phosphate
  modified_base 4: mod_base = OTHER; note = 2'-O-methyladenosine-3'-phosphate
  modified_base 5: mod_base = OTHER; note = 2'-O-methylguanosine-3'-phosphate
  modified_base 6: mod_base = OTHER; note = 2'-O-methyladenosine-3'-phosphate
  modified_base 7: mod_base = OTHER; note = 2'-deoxy-2'-fluoroadenosine-3'-phosphate
  modified_base 8: mod_base = OTHER; note = 2'-O-methyluridine-3'-phosphate
  modified_base 9: mod_base = OTHER; note = 2'-deoxy-2'-fluoroguanosine-3'-phosphate
  modified_base 10: mod_base = OTHER; note = 2'-deoxy-2'-fluoroadenosine-3'-phosphate
  modified_base 11: mod_base = OTHER; note = 2'-deoxy-2'-fluorouridine-3'-phosphate
  modified_base 12: mod_base = OTHER; note = 2'-O-methyluridine-3'-phosphate
  modified_base 13: mod_base = OTHER; note = 2'-O-methylcytidine-3'-phosphate
  modified_base 14: mod_base = OTHER; note = 2'-O-methyluridine-3'-phosphate
  modified_base 15: mod_base = OTHER; note = 2'-O-methyluridine-3'-phosphate
  modified_base 16: mod_base = OTHER; note = 2'-O-methyluridine-3'-phosphate
  modified_base 17: mod_base = OTHER; note = 2'-O-methylcytidine-3'-phosphate
  modified_base 18: mod_base = OTHER; note = 2'-O-methylcytidine-3'-phosphate
  modified_base 19: mod_base = OTHER; note = 2'-O-methyluridine-3'-phosphate
  modified_base 20: mod_base = OTHER; note = 2'-O-methylguanosine-3'-phosphate
  modified_base 21: mod_base = OTHER; note = 2'-O-methyluridine-3'-phosphate ((2S,4R)-1-[29-[[2-(acetylamino)-2-deoxy-beta-D-galactopyra nosyl]oxy]-14,14-bis[[3-[[3-[[5-[[2-(acetylamino)-2-deoxy-b eta-D-galactopyranosyl]oxy]-1-oxopentyl]amino]propyl]amino] -3-oxopropoxy]methyl]-1,12,19,25-tetraoxo-16-oxa-13,20,24-t riazanonacos-1-yl]-4-hydroxy-2-pyrrolidinyl)methyl ester
ttgagaatgattctttcctgt

SEQ ID NO: 94 - RNA, 23 nt, synthetic construct
  source 1..23: mol_type = other RNA
  modified_base 1: mod_base = OTHER; note = 2'-O-methyladenosine-3'-phosphorothioate
  modified_base 2: mod_base = OTHER; note = 2'-deoxy-2'-fluorocytidine-3'-phosphorothioate
  modified_base 3: mod_base = OTHER; note = 2'-O-methyladenosine-3'-phosphate
  modified_base 4: mod_base = OTHER; note = 2'-O-methylguanosine-3'-phosphate
  modified_base 5: mod_base = OTHER; note = 2'-O-methylguanosine-3'-phosphate
  modified_base 6: mod_base = OTHER; note = 2'-deoxy-2'-fluoroadenosine-3'-phosphate
  modified_base 7: mod_base = OTHER; note = 2'-O-methyladenosine-3'-phosphate
  modified_base 8: mod_base = OTHER; note = 2'-deoxy-2'-fluoroadenosine-3'-phosphate
  modified_base 9: mod_base = OTHER; note = 2'-deoxy-2'-fluoroguanosine-3'-phosphate
  modified_base 10: mod_base = OTHER; note = 2'-O-methyladenosine-3'-phosphate
  modified_base 11: mod_base = OTHER; note = 2'-O-methyladenosine-3'-phosphate
  modified_base 12: mod_base = OTHER; note = 2'-O-methyluridine-3'-phosphate
  modified_base 13: mod_base = OTHER; note = 2'-O-methylcytidine-3'-phosphate
  modified_base 14: mod_base = OTHER; note = 2'-deoxy-2'-fluoroadenosine-3'-phosphate
  modified_base 15: mod_base = OTHER; note = 2'-O-methyluridine-3'-phosphate
  modified_base 16: mod_base = OTHER; note = 2'-deoxy-2'-fluorouridine-3'-phosphate
  modified_base 17: mod_base = OTHER; note = 2'-O-methylcytidine-3'-phosphate
  modified_base 18: mod_base = OTHER; note = 2'-O-methyluridine-3'-phosphate
  modified_base 19: mod_base = OTHER; note = 2'-O-methylcytidine-3'-phosphate
  modified_base 20: mod_base = OTHER; note = 2'-O-methyladenosine-3'-phosphate
  modified_base 21: mod_base = OTHER; note = 2'-O-methyladenosine-3'-phosphorothioate
  modified_base 22: mod_base = OTHER; note = 2'-O-methyladenosine-3'-phosphorothioate
  modified_base 23: mod_base = OTHER; note = 2'-O-methyladenosine
acaggaaagaatcattctcaaaa

SEQ ID NO: 95 - RNA, 21 nt, synthetic construct
  source 1..21: mol_type = other RNA
  modified_base 1: mod_base = OTHER; note = 2'-O-methylcytidine-3'-phosphorothioate
  modified_base 2: mod_base = OTHER; note = 2'-O-methylguanosine-3'-phosphorothioate
  modified_base 3: mod_base = OTHER; note = 2'-O-methyluridine-3'-phosphate
  modified_base 4: mod_base = OTHER; note = 2'-O-methylguanosine-3'-phosphate
  modified_base 5: mod_base = OTHER; note = 2'-O-methyluridine-3'-phosphate
  modified_base 6: mod_base = OTHER; note = 2'-O-methylguanosine-3'-phosphate
  modified_base 7: mod_base = OTHER; note = 2'-deoxy-2'-fluoroadenosine-3'-phosphate
  modified_base 8: mod_base = OTHER; note = 2'-O-methyluridine-3'-phosphate
  modified_base 9: mod_base = OTHER; note = 2'-deoxy-2'-fluorocytidine-3'-phosphate
  modified_base 10: mod_base = OTHER; note = 2'-deoxy-2'-fluoroadenosine-3'-phosphate
  modified_base 11: mod_base = OTHER; note = 2'-deoxy-2'-fluoroadenosine-3'-phosphate
  modified_base 12: mod_base = OTHER; note = 2'-O-methyladenosine-3'-phosphate
  modified_base 13: mod_base = OTHER; note = 2'-O-methyladenosine-3'-phosphate
  modified_base 14: mod_base = OTHER; note = 2'-O-methylcytidine-3'-phosphate
  modified_base 15: mod_base = OTHER; note = 2'-O-methyladenosine-3'-phosphate
  modified_base 16: mod_base = OTHER; note = 2'-O-methyluridine-3'-phosphate
  modified_base 17: mod_base = OTHER; note = 2'-O-methyladenosine-3'-phosphate
  modified_base 18: mod_base = OTHER; note = 2'-O-methylcytidine-3'-phosphate
  modified_base 19: mod_base = OTHER; note = 2'-O-methyladenosine-3'-phosphate
  modified_base 20: mod_base = OTHER; note = 2'-O-methyladenosine-3'-phosphate
  modified_base 21: mod_base = OTHER; note = 2'-O-methyluridine-3'-phosphate ((2S,4R)-1-[29-[[2-(acetylamino)-2-deoxy-beta-D-galactopyra nosyl]oxy]-14,14-bis[[3-[[3-[[5-[[2-(acetylamino)-2-deoxy-b eta-D-galactopyranosyl]oxy]-1-oxopentyl]amino]propyl]amino] -3-oxopropoxy]methyl]-1,12,19,25-tetraoxo-16-oxa-13,20,24-t riazanonacos-1-yl]-4-hydroxy-2-pyrrolidinyl)methyl ester
cgtgtgatcaaaacatacaat

SEQ ID NO: 96 - RNA, 23 nt, synthetic construct
  source 1..23: mol_type = other RNA
  modified_base 1: mod_base = OTHER; note = 2'-O-methyladenosine-3'-phosphorothioate
  modified_base 2: mod_base = OTHER; note = 2'-deoxy-2'-fluorouridine-3'-phosphorothioate
  modified_base 3: mod_base = OTHER; note = 2'-O-methyluridine-3'-phosphate
  modified_base 4: mod_base = OTHER; note = 2'-O-methylguanosine-3'-phosphate
  modified_base 5: mod_base = OTHER; note = 2'-O-methyluridine-3'-phosphate
  modified_base 6: mod_base = OTHER; note = 2'-deoxy-2'-fluoroadenosine-3'-phosphate
  modified_base 7: mod_base = OTHER; note = 2'-O-methyluridine-3'-phosphate
  modified_base 8: mod_base = OTHER; note = 2'-deoxy-2'-fluoroguanosine-3'-phosphate
  modified_base 9: mod_base = OTHER; note = 2'-deoxy-2'-fluorouridine-3'-phosphate
  modified_base 10: mod_base = OTHER; note = 2'-O-methyluridine-3'-phosphate
  modified_base 11: mod_base = OTHER; note = 2'-O-methyluridine-3'-phosphate
  modified_base 12: mod_base = OTHER; note = 2'-O-methyluridine-3'-phosphate
  modified_base 13: mod_base = OTHER; note = 2'-O-methylguanosine-3'-phosphate
  modified_base 14: mod_base = OTHER; note = 2'-deoxy-2'-fluoroadenosine-3'-phosphate
  modified_base 15: mod_base = OTHER; note = 2'-O-methyluridine-3'-phosphate
  modified_base 16: mod_base = OTHER; note = 2'-deoxy-2'-fluorocytidine-3'-phosphate
  modified_base 17: mod_base = OTHER; note = 2'-O-methyladenosine-3'-phosphate
  modified_base 18: mod_base = OTHER; note = 2'-O-methylcytidine-3'-phosphate
  modified_base 19: mod_base = OTHER; note = 2'-O-methyladenosine-3'-phosphate
  modified_base 20: mod_base = OTHER; note = 2'-O-methylcytidine-3'-phosphate
  modified_base 21: mod_base = OTHER; note = 2'-O-methylguanosine-3'-phosphorothioate
  modified_base 22: mod_base = OTHER; note = 2'-O-methylcytidine-3'-phosphorothioate
  modified_base 23: mod_base = OTHER; note = 2'-O-methyluridine
attgtatgttttgatcacacgct

SEQ ID NO: 97 - RNA, 21 nt, synthetic construct
  source 1..21: mol_type = other RNA
  modified_base 1: mod_base = OTHER; note = 2'-O-methyladenosine-3'-phosphorothioate
  modified_base 2: mod_base = OTHER; note = 2'-O-methyladenosine-3'-phosphorothioate
  modified_base 3: mod_base = OTHER; note = 2'-O-methyladenosine-3'-phosphate
  modified_base 4: mod_base = OTHER; note = 2'-O-methylguanosine-3'-phosphate
  modified_base 5: mod_base = OTHER; note = 2'-O-methylguanosine-3'-phosphate
  modified_base 6: mod_base = OTHER; note = 2'-O-methyladenosine-3'-phosphate
  modified_base 7: mod_base = OTHER; note = 2'-deoxy-2'-fluorocytidine-3'-phosphate
  modified_base 8: mod_base = OTHER; note = 2'-O-methyluridine-3'-phosphate
  modified_base 9: mod_base = OTHER; note = 2'-deoxy-2'-fluorocytidine-3'-phosphate
  modified_base 10: mod_base = OTHER; note = 2'-deoxy-2'-fluorouridine-3'-phosphate
  modified_base 11: mod_base = OTHER; note = 2'-deoxy-2'-fluoroguanosine-3'-phosphate
  modified_base 12: mod_base = OTHER; note = 2'-O-methylcytidine-3'-phosphate
  modified_base 13: mod_base = OTHER; note = 2'-O-methyluridine-3'-phosphate
  modified_base 14: mod_base = OTHER; note = 2'-O-methyladenosine-3'-phosphate
  modified_base 15: mod_base = OTHER; note = 2'-O-methyluridine-3'-phosphate
  modified_base 16: mod_base = OTHER; note = 2'-O-methylguanosine-3'-phosphate
  modified_base 17: mod_base = OTHER; note = 2'-O-methylcytidine-3'-phosphate
  modified_base 18: mod_base = OTHER; note = 2'-O-methyluridine-3'-phosphate
  modified_base 19: mod_base = OTHER; note = 2'-O-methyluridine-3'-phosphate
  modified_base 20: mod_base = OTHER; note = 2'-O-methyluridine-3'-phosphate
  modified_base 21: mod_base = OTHER; note = 2'-O-methyluridine-3'-phosphate ((2S,4R)-1-[29-[[2-(acetylamino)-2-deoxy-beta-D-galactopyra nosyl]oxy]-14,14-bis[[3-[[3-[[5-[[2-(acetylamino)-2-deoxy-b eta-D-galactopyranosyl]oxy]-1-oxopentyl]amino]propyl]amino] -3-oxopropoxy]methyl]-1,12,19,25-tetraoxo-16-oxa-13,20,24-t riazanonacos-1-yl]-4-hydroxy-2-pyrrolidinyl)methyl ester
aaaggactctgctatgctttt

SEQ ID NO: 98 - RNA, 23 nt, synthetic construct
  source 1..23: mol_type = other RNA
  modified_base 1: mod_base = OTHER; note = 2'-O-methyladenosine-3'-phosphorothioate
  modified_base 2: mod_base = OTHER; note = 2'-deoxy-2'-fluoroadenosine-3'-phosphorothioate
  modified_base 3: mod_base = OTHER; note = 2'-O-methyladenosine-3'-phosphate
  modified_base 4: mod_base = OTHER; note = 2'-O-methyladenosine-3'-phosphate
  modified_base 5: mod_base = OTHER; note = 2'-O-methylguanosine-3'-phosphate
  modified_base 6: mod_base = OTHER; note = 2'-deoxy-2'-fluorocytidine-3'-phosphate
  modified_base 7: mod_base = OTHER; note = 2'-O-methyladenosine-3'-phosphate
  modified_base 8: mod_base = OTHER; note = 2'-deoxy-2'-fluorouridine-3'-phosphate
  modified_base 9: mod_base = OTHER; note = 2'-deoxy-2'-fluoroadenosine-3'-phosphate
  modified_base 10: mod_base = OTHER; note = 2'-O-methylguanosine-3'-phosphate
  modified_base 11: mod_base = OTHER; note = 2'-O-methylcytidine-3'-phosphate
  modified_base 12: mod_base = OTHER; note = 2'-O-methyladenosine-3'-phosphate
  modified_base 13: mod_base = OTHER; note = 2'-O-methylguanosine-3'-phosphate
  modified_base 14: mod_base = OTHER; note = 2'-deoxy-2'-fluoroadenosine-3'-phosphate
  modified_base 15: mod_base = OTHER; note = 2'-O-methylguanosine-3'-phosphate
  modified_base 16: mod_base = OTHER; note = 2'-deoxy-2'-fluorouridine-3'-phosphate
  modified_base 17: mod_base = OTHER; note = 2'-O-methylcytidine-3'-phosphate
  modified_base 18: mod_base = OTHER; note = 2'-O-methylcytidine-3'-phosphate
  modified_base 19: mod_base = OTHER; note = 2'-O-methyluridine-3'-phosphate
  modified_base 20: mod_base = OTHER; note = 2'-O-methyluridine-3'-phosphate
  modified_base 21: mod_base = OTHER; note = 2'-O-methyluridine-3'-phosphorothioate
  modified_base 22: mod_base = OTHER; note = 2'-O-methyluridine-3'-phosphorothioate
  modified_base 23: mod_base = OTHER; note = 2'-O-methyluridine
aaaagcatagcagagtccttttt

SEQ ID NO: 99 - RNA, 21 nt, synthetic construct
  source 1..21: mol_type = other RNA
  modified_base 1: mod_base = OTHER; note = 2'-O-methyladenosine-3'-phosphorothioate
  modified_base 2: mod_base = OTHER; note = 2'-O-methylguanosine-3'-phosphorothioate
  modified_base 3: mod_base = OTHER; note = 2'-O-methylguanosine-3'-phosphate
  modified_base 4: mod_base = OTHER; note = 2'-O-methyladenosine-3'-phosphate
  modified_base 5: mod_base = OTHER; note = 2'-O-methylcytidine-3'-phosphate
  modified_base 6: mod_base = OTHER; note = 2'-O-methyluridine-3'-phosphate
  modified_base 7: mod_base = OTHER; note = 2'-deoxy-2'-fluorocytidine-3'-phosphate
  modified_base 8: mod_base = OTHER; note = 2'-O-methyluridine-3'-phosphate
  modified_base 9: mod_base = OTHER; note = 2'-deoxy-2'-fluoroguanosine-3'-phosphate
  modified_base 10: mod_base = OTHER; note = 2'-deoxy-2'-fluorocytidine-3'-phosphate
  modified_base 11: mod_base = OTHER; note = 2'-deoxy-2'-fluorouridine-3'-phosphate
  modified_base 12: mod_base = OTHER; note = 2'-O-methyladenosine-3'-phosphate
  modified_base 13: mod_base = OTHER; note = 2'-O-methyluridine-3'-phosphate
  modified_base 14: mod_base = OTHER; note = 2'-O-methylguanosine-3'-phosphate
  modified_base 15: mod_base = OTHER; note = 2'-O-methylcytidine-3'-phosphate
  modified_base 16: mod_base = OTHER; note = 2'-O-methyluridine-3'-phosphate
  modified_base 17: mod_base = OTHER; note = 2'-O-methyluridine-3'-phosphate
  modified_base 18: mod_base = OTHER; note = 2'-O-methyluridine-3'-phosphate
  modified_base 19: mod_base = OTHER; note = 2'-O-methyluridine-3'-phosphate
  modified_base 20: mod_base = OTHER; note = 2'-O-methylguanosine-3'-phosphate
  modified_base 21: mod_base = OTHER; note = 2'-O-methyluridine-3'-phosphate ((2S,4R)-1-[29-[[2-(acetylamino)-2-deoxy-beta-D-galactopyra nosyl]oxy]-14,14-bis[[3-[[3-[[5-[[2-(acetylamino)-2-deoxy-b eta-D-galactopyranosyl]oxy]-1-oxopentyl]amino]propyl]amino] -3-oxopropoxy]methyl]-1,12,19,25-tetraoxo-16-oxa-13,20,24-t riazanonacos-1-yl]-4-hydroxy-2-pyrrolidinyl)methyl ester
aggactctgctatgcttttgt

SEQ ID NO: 100 - RNA, 23 nt, synthetic construct
  source 1..23: mol_type = other RNA
  modified_base 1: mod_base = OTHER; note = 2'-O-methyladenosine-3'-phosphorothioate
  modified_base 2: mod_base = OTHER; note = 2'-deoxy-2'-fluorocytidine-3'-phosphorothioate
  modified_base 3: mod_base = OTHER; note = 2'-O-methyladenosine-3'-phosphate
  modified_base 4: mod_base = OTHER; note = 2'-O-methyladenosine-3'-phosphate
  modified_base 5: mod_base = OTHER; note = 2'-O-methyladenosine-3'-phosphate
  modified_base 6: mod_base = OTHER; note = 2'-deoxy-2'-fluoroadenosine-3'-phosphate
  modified_base 7: mod_base = OTHER; note = 2'-O-methylguanosine-3'-phosphate
  modified_base 8: mod_base = OTHER; note = 2'-deoxy-2'-fluorocytidine-3'-phosphate
  modified_base 9: mod_base = OTHER; note = 2'-deoxy-2'-fluoroadenosine-3'-phosphate
  modified_base 10: mod_base = OTHER; note = 2'-O-methyluridine-3'-phosphate
  modified_base 11: mod_base = OTHER; note = 2'-O-methyladenosine-3'-phosphate
  modified_base 12: mod_base = OTHER; note = 2'-O-methylguanosine-3'-phosphate
  modified_base 13: mod_base = OTHER; note = 2'-O-methylcytidine-3'-phosphate
  modified_base 14: mod_base = OTHER; note = 2'-deoxy-2'-fluoroadenosine-3'-phosphate
  modified_base 15: mod_base = OTHER; note = 2'-O-methylguanosine-3'-phosphate
  modified_base 16: mod_base = OTHER; note = 2'-deoxy-2'-fluoroadenosine-3'-phosphate
  modified_base 17: mod_base = OTHER; note = 2'-O-methylguanosine-3'-phosphate
  modified_base 18: mod_base = OTHER; note = 2'-O-methyluridine-3'-phosphate
  modified_base 19: mod_base = OTHER; note = 2'-O-methylcytidine-3'-phosphate
  modified_base 20: mod_base = OTHER; note = 2'-O-methylcytidine-3'-phosphate
  modified_base 21: mod_base = OTHER; note = 2'-O-methyluridine-3'-phosphorothioate
  modified_base 22: mod_base = OTHER; note = 2'-O-methyluridine-3'-phosphorothioate
  modified_base 23: mod_base = OTHER; note = 2'-O-methyluridine
acaaaagcatagcagagtccttt

SEQ ID NO: 101 - RNA, 21 nt, synthetic construct
  source 1..21: mol_type = other RNA
  modified_base 1: mod_base = OTHER; note = 2'-O-methyluridine-3'-phosphorothioate
  modified_base 2: mod_base = OTHER; note = 2'-O-methylcytidine-3'-phosphorothioate
  modified_base 3: mod_base = OTHER; note = 2'-O-methyluridine-3'-phosphate
  modified_base 4: mod_base = OTHER; note = 2'-O-methylguanosine-3'-phosphate
  modified_base 5: mod_base = OTHER; note = 2'-O-methylcytidine-3'-phosphate
  modified_base 6: mod_base = OTHER; note = 2'-O-methyluridine-3'-phosphate
  modified_base 7: mod_base = OTHER; note = 2'-deoxy-2'-fluoroadenosine-3'-phosphate
  modified_base 8: mod_base = OTHER; note = 2'-O-methyluridine-3'-phosphate
  modified_base 9: mod_base = OTHER; note = 2'-deoxy-2'-fluoroguanosine-3'-phosphate
  modified_base 10: mod_base = OTHER; note = 2'-deoxy-2'-fluorocytidine-3'-phosphate
  modified_base 11: mod_base = OTHER; note = 2'-deoxy-2'-fluorouridine-3'-phosphate
  modified_base 12: mod_base = OTHER; note = 2'-O-methyluridine-3'-phosphate
  modified_base 13: mod_base = OTHER; note = 2'-O-methyluridine-3'-phosphate
  modified_base 14: mod_base = OTHER; note = 2'-O-methyluridine-3'-phosphate
  modified_base 15: mod_base = OTHER; note = 2'-O-methylguanosine-3'-phosphate
  modified_base 16: mod_base = OTHER; note = 2'-O-methyluridine-3'-phosphate
  modified_base 17: mod_base = OTHER; note = 2'-O-methylcytidine-3'-phosphate
  modified_base 18: mod_base = OTHER; note = 2'-O-methyluridine-3'-phosphate
  modified_base 19: mod_base = OTHER; note = 2'-O-methylguanosine-3'-phosphate
  modified_base 20: mod_base = OTHER; note = 2'-O-methylguanosine-3'-phosphate
  modified_base 21: mod_base = OTHER; note = 2'-O-methyluridine-3'-phosphate ((2S,4R)-1-[29-[[2-(acetylamino)-2-deoxy-beta-D-galactopyra nosyl]oxy]-14,14-bis[[3-[[3-[[5-[[2-(acetylamino)-2-deoxy-b eta-D-galactopyranosyl]oxy]-1-oxopentyl]amino]propyl]amino] -3-oxopropoxy]methyl]-1,12,19,25-tetraoxo-16-oxa-13,20,24-t riazanonacos-1-yl]-4-hydroxy-2-pyrrolidinyl)methyl ester
tctgctatgcttttgtctggt

SEQ ID NO: 102 - RNA, 23 nt, synthetic construct
  source 1..23: mol_type = other RNA
  modified_base 1: mod_base = OTHER; note = 2'-O-methyladenosine-3'-phosphorothioate
  modified_base 2: mod_base = OTHER; note = 2'-deoxy-2'-fluorocytidine-3'-phosphorothioate
  modified_base 3: mod_base = OTHER; note = 2'-O-methylcytidine-3'-phosphate
  modified_base 4: mod_base = OTHER; note = 2'-O-methyladenosine-3'-phosphate
  modified_base 5: mod_base = OTHER; note = 2'-O-methylguanosine-3'-phosphate
  modified_base 6: mod_base = OTHER; note = 2'-deoxy-2'-fluoroadenosine-3'-phosphate
  modified_base 7: mod_base = OTHER; note = 2'-O-methylcytidine-3'-phosphate
  modified_base 8: mod_base = OTHER; note = 2'-deoxy-2'-fluoroadenosine-3'-phosphate
  modified_base 9: mod_base = OTHER; note = 2'-deoxy-2'-fluoroadenosine-3'-phosphate
  modified_base 10: mod_base = OTHER; note = 2'-O-methyladenosine-3'-phosphate
  modified_base 11: mod_base = OTHER; note = 2'-O-methyladenosine-3'-phosphate
  modified_base 12: mod_base = OTHER; note = 2'-O-methylguanosine-3'-phosphate
  modified_base 13: mod_base = OTHER; note = 2'-O-methylcytidine-3'-phosphate
  modified_base 14: mod_base = OTHER; note = 2'-deoxy-2'-fluoroadenosine-3'-phosphate
  modified_base 15: mod_base = OTHER; note = 2'-O-methyluridine-3'-phosphate
  modified_base 16: mod_base = OTHER; note = 2'-deoxy-2'-fluoroadenosine-3'-phosphate
  modified_base 17: mod_base = OTHER; note = 2'-O-methylguanosine-3'-phosphate
  modified_base 18: mod_base = OTHER; note = 2'-O-methylcytidine-3'-phosphate
  modified_base 19: mod_base = OTHER; note = 2'-O-methyladenosine-3'-phosphate
  modified_base 20: mod_base = OTHER; note = 2'-O-methylguanosine-3'-phosphate
  modified_base 21: mod_base = OTHER; note = 2'-O-methyladenosine-3'-phosphorothioate
  modified_base 22: mod_base = OTHER; note = 2'-O-methylguanosine-3'-phosphorothioate
  modified_base 23: mod_base = OTHER; note = 2'-O-methyluridine
accagacaaaagcatagcagagt

SEQ ID NO: 103 - RNA, 21 nt, synthetic construct
  source 1..21: mol_type = other RNA
  modified_base 1: mod_base = OTHER; note = 2'-O-methyluridine-3'-phosphorothioate
  modified_base 2: mod_base = OTHER; note = 2'-O-methylcytidine-3'-phosphorothioate
  modified_base 3: mod_base = OTHER; note = 2'-O-methyluridine-3'-phosphate
  modified_base 4: mod_base = OTHER; note = 2'-O-methylguanosine-3'-phosphate
  modified_base 5: mod_base = OTHER; note = 2'-O-methylguanosine-3'-phosphate
  modified_base 6: mod_base = OTHER; note = 2'-O-methylcytidine-3'-phosphate
  modified_base 7: mod_base = OTHER; note = 2'-deoxy-2'-fluorouridine-3'-phosphate
  modified_base 8: mod_base = OTHER; note = 2'-O-methylguanosine-3'-phosphate
  modified_base 9: mod_base = OTHER; note = 2'-deoxy-2'-fluorouridine-3'-phosphate
  modified_base 10: mod_base = OTHER; note = 2'-deoxy-2'-fluorouridine-3'-phosphate
  modified_base 11: mod_base = OTHER; note = 2'-deoxy-2'-fluorocytidine-3'-phosphate
  modified_base 12: mod_base = OTHER; note = 2'-O-methylcytidine-3'-phosphate
  modified_base 13: mod_base = OTHER; note = 2'-O-methylcytidine-3'-phosphate
  modified_base 14: mod_base = OTHER; note = 2'-O-methyladenosine-3'-phosphate
  modified_base 15: mod_base = OTHER; note = 2'-O-methylcytidine-3'-phosphate
  modified_base 16: mod_base = OTHER; note = 2'-O-methyluridine-3'-phosphate
  modified_base 17: mod_base = OTHER; note = 2'-O-methyluridine-3'-phosphate
  modified_base 18: mod_base = OTHER; note = 2'-O-methyladenosine-3'-phosphate
  modified_base 19: mod_base = OTHER; note = 2'-O-methylcytidine-3'-phosphate
  modified_base 20: mod_base = OTHER; note = 2'-O-methyluridine-3'-phosphate
  modified_base 21: mod_base = OTHER; note = 2'-O-methyluridine-3'-phosphate ((2S,4R)-1-[29-[[2-(acetylamino)-2-deoxy-beta-D-galactopyra nosyl]oxy]-14,14-bis[[3-[[3-[[5-[[2-(acetylamino)-2-deoxy-b eta-D-galactopyranosyl]oxy]-1-oxopentyl]amino]propyl]amino] -3-oxopropoxy]methyl]-1,12,19,25-tetraoxo-16-oxa-13,20,24-t riazanonacos-1-yl]-4-hydroxy-2-pyrrolidinyl)methyl ester
tctggctgttcccacttactt

SEQ ID NO: 104 - RNA, 23 nt, synthetic construct
  source 1..23: mol_type = other RNA
  modified_base 1: mod_base = OTHER; note = 2'-O-methyladenosine-3'-phosphorothioate
  modified_base 2: mod_base = OTHER; note = 2'-deoxy-2'-fluoroadenosine-3'-phosphorothioate
  modified_base 3: mod_base = OTHER; note = 2'-O-methylguanosine-3'-phosphate
  modified_base 4: mod_base = OTHER; note = 2'-O-methyluridine-3'-phosphate
  modified_base 5: mod_base = OTHER; note = 2'-O-methyladenosine-3'-phosphate
  modified_base 6: mod_base = OTHER; note = 2'-deoxy-2'-fluoroadenosine-3'-phosphate
  modified_base 7: mod_base = OTHER; note = 2'-O-methylguanosine-3'-phosphate
  modified_base 8: mod_base = OTHER; note = 2'-deoxy-2'-fluorouridine-3'-phosphate
  modified_base 9: mod_base = OTHER; note = 2'-deoxy-2'-fluoroguanosine-3'-phosphate
  modified_base 10: mod_base = OTHER; note = 2'-O-methylguanosine-3'-phosphate
  modified_base 11: mod_base = OTHER; note = 2'-O-methylguanosine-3'-phosphate
  modified_base 12: mod_base = OTHER; note = 2'-O-methyladenosine-3'-phosphate
  modified_base 13: mod_base = OTHER; note = 2'-O-methyladenosine-3'-phosphate
  modified_base 14: mod_base = OTHER; note = 2'-deoxy-2'-fluorocytidine-3'-phosphate
  modified_base 15: mod_base = OTHER; note = 2'-O-methyladenosine-3'-phosphate
  modified_base 16: mod_base = OTHER; note = 2'-deoxy-2'-fluoroguanosine-3'-phosphate
  modified_base 17: mod_base = OTHER; note = 2'-O-methylcytidine-3'-phosphate
  modified_base 18: mod_base = OTHER; note = 2'-O-methylcytidine-3'-phosphate
  modified_base 19: mod_base = OTHER; note = 2'-O-methyladenosine-3'-phosphate
  modified_base 20: mod_base = OTHER; note = 2'-O-methylguanosine-3'-phosphate
  modified_base 21: mod_base = OTHER; note = 2'-O-methyladenosine-3'-phosphorothioate
  modified_base 22: mod_base = OTHER; note = 2'-O-methylcytidine-3'-phosphorothioate
  modified_base 23: mod_base = OTHER; note = 2'-O-methyladenosine
aagtaagtgggaacagccagaca

SEQ ID NO: 105 - RNA, 21 nt, synthetic construct
  source 1..21: mol_type = other RNA
  modified_base 1: mod_base = OTHER; note = 2'-O-methylcytidine-3'-phosphorothioate
  modified_base 2: mod_base = OTHER; note = 2'-O-methylcytidine-3'-phosphorothioate
  modified_base 3: mod_base = OTHER; note = 2'-O-methylcytidine-3'-phosphate
  modified_base 4: mod_base = OTHER; note = 2'-O-methyladenosine-3'-phosphate
  modified_base 5: mod_base = OTHER; note = 2'-O-methylcytidine-3'-phosphate
  modified_base 6: mod_base = OTHER; note = 2'-O-methyluridine-3'-phosphate
  modified_base 7: mod_base = OTHER; note = 2'-deoxy-2'-fluorouridine-3'-phosphate
  modified_base 8: mod_base = OTHER; note = 2'-O-methyladenosine-3'-phosphate
  modified_base 9: mod_base = OTHER; note = 2'-deoxy-2'-fluorocytidine-3'-phosphate
  modified_base 10: mod_base = OTHER; note = 2'-deoxy-2'-fluorouridine-3'-phosphate
  modified_base 11: mod_base = OTHER; note = 2'-deoxy-2'-fluoroguanosine-3'-phosphate
  modified_base 12: mod_base = OTHER; note = 2'-O-methylcytidine-3'-phosphate
  modified_base 13: mod_base = OTHER; note = 2'-O-methyladenosine-3'-phosphate
  modified_base 14: mod_base = OTHER; note = 2'-O-methylcytidine-3'-phosphate
  modified_base 15: mod_base = OTHER; note = 2'-O-methyladenosine-3'-phosphate
  modified_base 16: mod_base = OTHER; note = 2'-O-methyladenosine-3'-phosphate
  modified_base 17: mod_base = OTHER; note = 2'-O-methylcytidine-3'-phosphate
  modified_base 18: mod_base = OTHER; note = 2'-O-methyladenosine-3'-phosphate
  modified_base 19: mod_base = OTHER; note = 2'-O-methyladenosine-3'-phosphate
  modified_base 20: mod_base = OTHER; note = 2'-O-methylguanosine-3'-phosphate
  modified_base 21: mod_base = OTHER; note = 2'-O-methyluridine-3'-phosphate ((2S,4R)-1-[29-[[2-(acetylamino)-2-deoxy-beta-D-galactopyra nosyl]oxy]-14,14-bis[[3-[[3-[[5-[[2-(acetylamino)-2-deoxy-b eta-D-galactopyranosyl]oxy]-1-oxopentyl]amino]propyl]amino] -3-oxopropoxy]methyl]-1,12,19,25-tetraoxo-16-oxa-13,20,24-t riazanonacos-1-yl]-4-hydroxy-2-pyrrolidinyl)methyl ester
cccacttactgcacaacaagt

SEQ ID NO: 106 - RNA, 23 nt, synthetic construct
  source 1..23: mol_type = other RNA
  modified_base 1: mod_base = OTHER; note = 2'-O-methyladenosine-3'-phosphorothioate
  modified_base 2: mod_base = OTHER; note = 2'-deoxy-2'-fluorocytidine-3'-phosphorothioate
  modified_base 3: mod_base = OTHER; note = 2'-O-methyluridine-3'-phosphate
  modified_base 4: mod_base = OTHER; note = 2'-O-methyluridine-3'-phosphate
  modified_base 5: mod_base = OTHER; note = 2'-O-methylguanosine-3'-phosphate
  modified_base 6: mod_base = OTHER; note = 2'-deoxy-2'-fluorouridine-3'-phosphate
  modified_base 7: mod_base = OTHER; note = 2'-O-methyluridine-3'-phosphate
  modified_base 8: mod_base = OTHER; note = 2'-deoxy-2'-fluoroguanosine-3'-phosphate
  modified_base 9: mod_base = OTHER; note = 2'-deoxy-2'-fluorouridine-3'-phosphate
  modified_base 10: mod_base = OTHER; note = 2'-O-methylguanosine-3'-phosphate
  modified_base 11: mod_base = OTHER; note = 2'-O-methylcytidine-3'-phosphate
  modified_base 12: mod_base = OTHER; note = 2'-O-methyladenosine-3'-phosphate
  modified_base 13: mod_base = OTHER; note = 2'-O-methylguanosine-3'-phosphate
  modified_base 14: mod_base = OTHER; note = 2'-deoxy-2'-fluorouridine-3'-phosphate
  modified_base 15: mod_base = OTHER; note = 2'-O-methyladenosine-3'-phosphate
  modified_base 16: mod_base = OTHER; note = 2'-deoxy-2'-fluoroadenosine-3'-phosphate
  modified_base 17: mod_base = OTHER; note = 2'-O-methylguanosine-3'-phosphate
  modified_base 18: mod_base = OTHER; note = 2'-O-methyluridine-3'-phosphate
  modified_base 19: mod_base = OTHER; note = 2'-O-methylguanosine-3'-phosphate
  modified_base 20: mod_base = OTHER; note = 2'-O-methylguanosine-3'-phosphate
  modified_base 21: mod_base = OTHER; note = 2'-O-methylguanosine-3'-phosphorothioate
  modified_base 22: mod_base = OTHER; note = 2'-O-methyladenosine-3'-phosphorothioate
  modified_base 23: mod_base = OTHER; note = 2'-O-methyladenosine
acttgttgtgcagtaagtgggaa

SEQ ID NO: 107 - RNA, 21 nt, synthetic construct
  source 1..21: mol_type = other RNA
  modified_base 1: mod_base = OTHER; note = 2'-O-methyluridine-3'-phosphorothioate
  modified_base 2: mod_base = OTHER; note = 2'-O-methylguanosine-3'-phosphorothioate
  modified_base 3: mod_base = OTHER; note = 2'-O-methylcytidine-3'-phosphate
  modified_base 4: mod_base = OTHER; note = 2'-O-methylcytidine-3'-phosphate
  modified_base 5: mod_base = OTHER; note = 2'-O-methylcytidine-3'-phosphate
  modified_base 6: mod_base = OTHER; note = 2'-O-methyladenosine-3'-phosphate
  modified_base 7: mod_base = OTHER; note = 2'-deoxy-2'-fluorocytidine-3'-phosphate
  modified_base 8: mod_base = OTHER; note = 2'-O-methyluridine-3'-phosphate
  modified_base 9: mod_base = OTHER; note = 2'-deoxy-2'-fluoroguanosine-3'-phosphate
  modified_base 10: mod_base = OTHER; note = 2'-deoxy-2'-fluorouridine-3'-phosphate
  modified_base 11: mod_base = OTHER; note = 2'-deoxy-2'-fluoroadenosine-3'-phosphate
  modified_base 12: mod_base = OTHER; note = 2'-O-methyluridine-3'-phosphate
  modified_base 13: mod_base = OTHER; note = 2'-O-methyluridine-3'-phosphate
  modified_base 14: mod_base = OTHER; note = 2'-O-methylcytidine-3'-phosphate
  modified_base 15: mod_base = OTHER; note = 2'-O-methyluridine-3'-phosphate
  modified_base 16: mod_base = OTHER; note = 2'-O-methyluridine-3'-phosphate
  modified_base 17: mod_base = OTHER; note = 2'-O-methylcytidine-3'-phosphate
  modified_base 18: mod_base = OTHER; note = 2'-O-methyluridine-3'-phosphate
  modified_base 19: mod_base = OTHER; note = 2'-O-methyluridine-3'-phosphate
  modified_base 20: mod_base = OTHER; note = 2'-O-methylguanosine-3'-phosphate
  modified_base 21: mod_base = OTHER; note = 2'-O-methyluridine-3'-phosphate ((2S,4R)-1-[29-[[2-(acetylamino)-2-deoxy-beta-D-galactopyra nosyl]oxy]-14,14-bis[[3-[[3-[[5-[[2-(acetylamino)-2-deoxy-b eta-D-galactopyranosyl]oxy]-1-oxopentyl]amino]propyl]amino] -3-oxopropoxy]methyl]-1,12,19,25-tetraoxo-16-oxa-13,20,24-t riazanonacos-1-yl]-4-hydroxy-2-pyrrolidinyl)methyl ester
tgcccactgtattcttcttgt

SEQ ID NO: 108 - RNA, 23 nt, synthetic construct
  source 1..23: mol_type = other RNA
  modified_base 1: mod_base = OTHER; note = 2'-O-methyladenosine-3'-phosphorothioate
  modified_base 2: mod_base = OTHER; note = 2'-deoxy-2'-fluorocytidine-3'-phosphorothioate
  modified_base 3: mod_base = OTHER; note = 2'-O-methyladenosine-3'-phosphate
  modified_base 4: mod_base = OTHER; note = 2'-O-methyladenosine-3'-phosphate
  modified_base 5: mod_base = OTHER; note = 2'-O-methylguanosine-3'-phosphate
  modified_base 6: mod_base = OTHER; note = 2'-deoxy-2'-fluoroadenosine-3'-phosphate
  modified_base 7: mod_base = OTHER; note = 2'-O-methyladenosine-3'-phosphate
  modified_base 8: mod_base = OTHER; note = 2'-deoxy-2'-fluoroguanosine-3'-phosphate
  modified_base 9: mod_base = OTHER; note = 2'-deoxy-2'-fluoroadenosine-3'-phosphate
  modified_base 10: mod_base = OTHER; note = 2'-O-methyladenosine-3'-phosphate
  modified_base 11: mod_base = OTHER; note = 2'-O-methyluridine-3'-phosphate
  modified_base 12: mod_base = OTHER; note = 2'-O-methyladenosine-3'-phosphate
  modified_base 13: mod_base = OTHER; note = 2'-O-methylcytidine-3'-phosphate
  modified_base 14: mod_base = OTHER; note = 2'-deoxy-2'-fluoroadenosine-3'-phosphate
  modified_base 15: mod_base = OTHER; note = 2'-O-methylguanosine-3'-phosphate
  modified_base 16: mod_base = OTHER; note = 2'-deoxy-2'-fluorouridine-3'-phosphate
  modified_base 17: mod_base = OTHER; note = 2'-O-methylguanosine-3'-phosphate
  modified_base 18: mod_base = OTHER; note = 2'-O-methylguanosine-3'-phosphate
  modified_base 19: mod_base = OTHER; note = 2'-O-methylguanosine-3'-phosphate
  modified_base 20: mod_base = OTHER; note = 2'-O-methylcytidine-3'-phosphate
  modified_base 21: mod_base = OTHER; note = 2'-O-methyladenosine-3'-phosphorothioate
  modified_base 22: mod_base = OTHER; note = 2'-O-methylguanosine-3'-phosphorothioate
  modified_base 23: mod_base = OTHER; note = 2'-O-methyladenosine
acaagaagaatacagtgggcaga

SEQ ID NO: 109 - RNA, 21 nt, synthetic construct
  source 1..21: mol_type = other RNA
  modified_base 1: mod_base = OTHER; note = 2'-O-methylcytidine-3'-phosphorothioate
  modified_base 2: mod_base = OTHER; note = 2'-O-methyluridine-3'-phosphorothioate
  modified_base 3: mod_base = OTHER; note = 2'-O-methylguanosine-3'-phosphate
  modified_base 4: mod_base = OTHER; note = 2'-O-methyluridine-3'-phosphate
  modified_base 5: mod_base = OTHER; note = 2'-O-methylguanosine-3'-phosphate
  modified_base 6: mod_base = OTHER; note = 2'-O-methylcytidine-3'-phosphate
  modified_base 7: mod_base = OTHER; note = 2'-deoxy-2'-fluoroguanosine-3'-phosphate
  modified_base 8: mod_base = OTHER; note = 2'-O-methyladenosine-3'-phosphate
  modified_base 9: mod_base = OTHER; note = 2'-deoxy-2'-fluorocytidine-3'-phosphate
  modified_base 10: mod_base = OTHER; note = 2'-deoxy-2'-fluoroguanosine-3'-phosphate
  modified_base 11: mod_base = OTHER; note = 2'-deoxy-2'-fluorouridine-3'-phosphate
  modified_base 12: mod_base = OTHER; note = 2'-O-methylguanosine-3'-phosphate
  modified_base 13: mod_base = OTHER; note = 2'-O-methylguanosine-3'-phosphate
  modified_base 14: mod_base = OTHER; note = 2'-O-methyluridine-3'-phosphate
  modified_base 15: mod_base = OTHER; note = 2'-O-methyluridine-3'-phosphate
  modified_base 16: mod_base = OTHER; note = 2'-O-methyluridine-3'-phosphate
  modified_base 17: mod_base = OTHER; note = 2'-O-methyladenosine-3'-phosphate
  modified_base 18: mod_base = OTHER; note = 2'-O-methyluridine-3'-phosphate
  modified_base 19: mod_base = OTHER; note = 2'-O-methyluridine-3'-phosphate
  modified_base 20: mod_base = OTHER; note = 2'-O-methylcytidine-3'-phosphate
  modified_base 21: mod_base = OTHER; note = 2'-O-methyluridine-3'-phosphate ((2S,4R)-1-[29-[[2-(acetylamino)-2-deoxy-beta-D-galactopyra nosyl]oxy]-14,14-bis[[3-[[3-[[5-[[2-(acetylamino)-2-deoxy-b eta-D-galactopyranosyl]oxy]-1-oxopentyl]amino]propyl]amino] -3-oxopropoxy]methyl]-1,12,19,25-tetraoxo-16-oxa-13,20,24-t riazanonacos-1-yl]-4-hydroxy-2-pyrrolidinyl)methyl ester
ctgtgcgacgtggtttattct

SEQ ID NO: 110 - RNA, 23 nt, synthetic construct
  source 1..23: mol_type = other RNA
  modified_base 1: mod_base = OTHER; note = 2'-O-methyladenosine-3'-phosphorothioate
  modified_base 2: mod_base = OTHER; note = 2'-deoxy-2'-fluoroguanosine-3'-phosphorothioate
  modified_base 3: mod_base = OTHER; note = 2'-O-methyladenosine-3'-phosphate
  modified_base 4: mod_base = OTHER; note = 2'-O-methyladenosine-3'-phosphate
  modified_base 5: mod_base = OTHER; note = 2'-O-methyluridine-3'-phosphate
  modified_base 6: mod_base = OTHER; note = 2'-deoxy-2'-fluoroadenosine-3'-phosphate
  modified_base 7: mod_base = OTHER; note = 2'-O-methyladenosine-3'-phosphate
  modified_base 8: mod_base = OTHER; note = 2'-deoxy-2'-fluoroadenosine-3'-phosphate
  modified_base 9: mod_base = OTHER; note = 2'-deoxy-2'-fluorocytidine-3'-phosphate
  modified_base 10: mod_base = OTHER; note = 2'-O-methylcytidine-3'-phosphate
  modified_base 11: mod_base = OTHER; note = 2'-O-methyladenosine-3'-phosphate
  modified_base 12: mod_base = OTHER; note = 2'-O-methylcytidine-3'-phosphate
  modified_base 13: mod_base = OTHER; note = 2'-O-methylguanosine-3'-phosphate
  modified_base 14: mod_base = OTHER; note = 2'-deoxy-2'-fluorouridine-3'-phosphate
  modified_base 15: mod_base = OTHER; note = 2'-O-methylcytidine-3'-phosphate
  modified_base 16: mod_base = OTHER; note = 2'-deoxy-2'-fluoroguanosine-3'-phosphate
  modified_base 17: mod_base = OTHER; note = 2'-O-methylcytidine-3'-phosphate
  modified_base 18: mod_base = OTHER; note = 2'-O-methyladenosine-3'-phosphate
  modified_base 19: mod_base = OTHER; note = 2'-O-methylcytidine-3'-phosphate
  modified_base 20: mod_base = OTHER; note = 2'-O-methyladenosine-3'-phosphate
  modified_base 21: mod_base = OTHER; note = 2'-O-methylguanosine-3'-phosphorothioate
  modified_base 22: mod_base = OTHER; note = 2'-O-methyladenosine-3'-phosphorothioate
  modified_base 23: mod_base = OTHER; note = 2'-O-methyladenosine
agaataaaccacgtcgcacagaa

SEQ ID NO: 111 - RNA, 21 nt, synthetic construct
  source 1..21: mol_type = other RNA
  modified_base 1: mod_base = OTHER; note = 2'-O-methyluridine-3'-phosphorothioate
  modified_base 2: mod_base = OTHER; note = 2'-O-methylguanosine-3'-phosphorothioate
  modified_base 3: mod_base = OTHER; note = 2'-O-methyluridine-3'-phosphate
  modified_base 4: mod_base = OTHER; note = 2'-O-methylguanosine-3'-phosphate
  modified_base 5: mod_base = OTHER; note = 2'-O-methylcytidine-3'-phosphate
  modified_base 6: mod_base = OTHER; note = 2'-O-methylguanosine-3'-phosphate
  modified_base 7: mod_base = OTHER; note = 2'-deoxy-2'-fluoroadenosine-3'-phosphate
  modified_base 8: mod_base = OTHER; note = 2'-O-methylcytidine-3'-phosphate
  modified_base 9: mod_base = OTHER; note = 2'-deoxy-2'-fluoroguanosine-3'-phosphate
  modified_base 10: mod_base = OTHER; note = 2'-deoxy-2'-fluorouridine-3'-phosphate
  modified_base 11: mod_base = OTHER; note = 2'-deoxy-2'-fluoroguanosine-3'-phosphate
  modified_base 12: mod_base = OTHER; note = 2'-O-methylguanosine-3'-phosphate
  modified_base 13: mod_base = OTHER; note = 2'-O-methyluridine-3'-phosphate
  modified_base 14: mod_base = OTHER; note = 2'-O-methyluridine-3'-phosphate
  modified_base 15: mod_base = OTHER; note = 2'-O-methyluridine-3'-phosphate
  modified_base 16: mod_base = OTHER; note = 2'-O-methyladenosine-3'-phosphate
  modified_base 17: mod_base = OTHER; note = 2'-O-methyluridine-3'-phosphate
  modified_base 18: mod_base = OTHER; note = 2'-O-methyluridine-3'-phosphate
  modified_base 19: mod_base = OTHER; note = 2'-O-methylcytidine-3'-phosphate
  modified_base 20: mod_base = OTHER; note = 2'-O-methylcytidine-3'-phosphate
  modified_base 21: mod_base = OTHER; note = 2'-O-methyluridine-3'-phosphate ((2S,4R)-1-[29-[[2-(acetylamino)-2-deoxy-beta-D-galactopyra nosyl]oxy]-14,14-bis[[3-[[3-[[5-[[2-(acetylamino)-2-deoxy-b eta-D-galactopyranosyl]oxy]-1-oxopentyl]amino]propyl]amino] -3-oxopropoxy]methyl]-1,12,19,25-tetraoxo-16-oxa-13,20,24-t riazanonacos-1-yl]-4-hydroxy-2-pyrrolidinyl)methyl ester
tgtgcgacgtggtttattcct

SEQ ID NO: 112 - RNA, 23 nt, synthetic construct
  source 1..23: mol_type = other RNA
  modified_base 1: mod_base = OTHER; note = 2'-O-methyladenosine-3'-phosphorothioate
  modified_base 2: mod_base = OTHER; note = 2'-deoxy-2'-fluoroguanosine-3'-phosphorothioate
  modified_base 3: mod_base = OTHER; note = 2'-O-methylguanosine-3'-phosphate
  modified_base 4: mod_base = OTHER; note = 2'-O-methyladenosine-3'-phosphate
  modified_base 5: mod_base = OTHER; note = 2'-O-methyladenosine-3'-phosphate
  modified_base 6: mod_base = OTHER; note = 2'-deoxy-2'-fluorouridine-3'-phosphate
  modified_base 7: mod_base = OTHER; note = 2'-O-methyladenosine-3'-phosphate
  modified_base 8: mod_base = OTHER; note = 2'-deoxy-2'-fluoroadenosine-3'-phosphate
  modified_base 9: mod_base = OTHER; note = 2'-deoxy-2'-fluoroadenosine-3'-phosphate
  modified_base 10: mod_base = OTHER; note = 2'-O-methylcytidine-3'-phosphate
  modified_base 11: mod_base = OTHER; note = 2'-O-methylcytidine-3'-phosphate
  modified_base 12: mod_base = OTHER; note = 2'-O-methyladenosine-3'-phosphate
  modified_base 13: mod_base = OTHER; note = 2'-O-methylcytidine-3'-phosphate
  modified_base 14: mod_base = OTHER; note = 2'-deoxy-2'-fluoroguanosine-3'-phosphate
  modified_base 15: mod_base = OTHER; note = 2'-O-methyluridine-3'-phosphate
  modified_base 16: mod_base = OTHER; note = 2'-deoxy-2'-fluorocytidine-3'-phosphate
  modified_base 17: mod_base = OTHER; note = 2'-O-methylguanosine-3'-phosphate
  modified_base 18: mod_base = OTHER; note = 2'-O-methylcytidine-3'-phosphate
  modified_base 19: mod_base = OTHER; note = 2'-O-methyladenosine-3'-phosphate
  modified_base 20: mod_base = OTHER; note = 2'-O-methylcytidine-3'-phosphate
  modified_base 21: mod_base = OTHER; note = 2'-O-methyladenosine-3'-phosphorothioate
  modified_base 22: mod_base = OTHER; note = 2'-O-methylguanosine-3'-phosphorothioate
  modified_base 23: mod_base = OTHER; note = 2'-O-methyladenosine
aggaataaaccacgtcgcacaga

SEQ ID NO: 113 - RNA, 21 nt, synthetic construct
  source 1..21: mol_type = other RNA
  modified_base 1: mod_base = OTHER; note = 2'-O-methyladenosine-3'-phosphorothioate
  modified_base 2: mod_base = OTHER; note = 2'-O-methyluridine-3'-phosphorothioate
  modified_base 3: mod_base = OTHER; note = 2'-O-methyluridine-3'-phosphate
  modified_base 4: mod_base = OTHER; note = 2'-O-methylguanosine-3'-phosphate
  modified_base 5: mod_base = OTHER; note = 2'-O-methyladenosine-3'-phosphate
  modified_base 6: mod_base = OTHER; note = 2'-O-methylguanosine-3'-phosphate
  modified_base 7: mod_base = OTHER; note = 2'-deoxy-2'-fluorocytidine-3'-phosphate
  modified_base 8: mod_base = OTHER; note = 2'-O-methyluridine-3'-phosphate
  modified_base 9: mod_base = OTHER; note = 2'-deoxy-2'-fluorocytidine-3'-phosphate
  modified_base 10: mod_base = OTHER; note = 2'-deoxy-2'-fluorouridine-3'-phosphate
  modified_base 11: mod_base = OTHER; note = 2'-deoxy-2'-fluoroguanosine-3'-phosphate
  modified_base 12: mod_base = OTHER; note = 2'-O-methylcytidine-3'-phosphate
  modified_base 13: mod_base = OTHER; note = 2'-O-methyladenosine-3'-phosphate
  modified_base 14: mod_base = OTHER; note = 2'-O-methyluridine-3'-phosphate
  modified_base 15: mod_base = OTHER; note = 2'-O-methylcytidine-3'-phosphate
  modified_base 16: mod_base = OTHER; note = 2'-O-methyluridine-3'-phosphate
  modified_base 17: mod_base = OTHER; note = 2'-O-methylguanosine-3'-phosphate
  modified_base 18: mod_base = OTHER; note = 2'-O-methyluridine-3'-phosphate
  modified_base 19: mod_base = OTHER; note = 2'-O-methylcytidine-3'-phosphate
  modified_base 20: mod_base = OTHER; note = 2'-O-methyluridine-3'-phosphate
  modified_base 21: mod_base = OTHER; note = 2'-O-methyluridine-3'-phosphate ((2S,4R)-1-[29-[[2-(acetylamino)-2-deoxy-beta-D-galactopyra nosyl]oxy]-14,14-bis[[3-[[3-[[5-[[2-(acetylamino)-2-deoxy-b eta-D-galactopyranosyl]oxy]-1-oxopentyl]amino]propyl]amino] -3-oxopropoxy]methyl]-1,12,19,25-tetraoxo-16-oxa-13,20,24-t riazanonacos-1-yl]-4-hydroxy-2-pyrrolidinyl)methyl ester
attgagctctgcatctgtctt

SEQ ID NO: 114 - RNA, 23 nt, synthetic construct
  source 1..23: mol_type = other RNA
  modified_base 1: mod_base = OTHER; note = 2'-O-methyladenosine-3'-phosphorothioate
  modified_base 2: mod_base = OTHER; note = 2'-deoxy-2'-fluoroadenosine-3'-phosphorothioate
  modified_base 3: mod_base = OTHER; note = 2'-O-methylguanosine-3'-phosphate
  modified_base 4: mod_base = OTHER; note = 2'-O-methyladenosine-3'-phosphate
  modified_base 5: mod_base = OTHER; note = 2'-O-methylcytidine-3'-phosphate
  modified_base 6: mod_base = OTHER; note = 2'-deoxy-2'-fluoroadenosine-3'-phosphate
  modified_base 7: mod_base = OTHER; note = 2'-O-methylguanosine-3'-phosphate
  modified_base 8: mod_base = OTHER; note = 2'-deoxy-2'-fluoroadenosine-3'-phosphate
  modified_base 9: mod_base = OTHER; note = 2'-deoxy-2'-fluorouridine-3'-phosphate
  modified_base 10: mod_base = OTHER; note = 2'-O-methylguanosine-3'-phosphate
  modified_base 11: mod_base = OTHER; note = 2'-O-methylcytidine-3'-phosphate
  modified_base 12: mod_base = OTHER; note = 2'-O-methyladenosine-3'-phosphate
  modified_base 13: mod_base = OTHER; note = 2'-O-methylguanosine-3'-phosphate
  modified_base 14: mod_base = OTHER; note = 2'-deoxy-2'-fluoroadenosine-3'-phosphate
  modified_base 15: mod_base = OTHER; note = 2'-O-methylguanosine-3'-phosphate
  modified_base 16: mod_base = OTHER; note = 2'-deoxy-2'-fluorocytidine-3'-phosphate
  modified_base 17: mod_base = OTHER; note = 2'-O-methyluridine-3'-phosphate
  modified_base 18: mod_base = OTHER; note = 2'-O-methylcytidine-3'-phosphate
  modified_base 19: mod_base = OTHER; note = 2'-O-methyladenosine-3'-phosphate
  modified_base 20: mod_base = OTHER; note = 2'-O-methyladenosine-3'-phosphate
  modified_base 21: mod_base = OTHER; note = 2'-O-methyluridine-3'-phosphorothioate
  modified_base 22: mod_base = OTHER; note = 2'-O-methyladenosine-3'-phosphorothioate
  modified_base 23: mod_base = OTHER; note = 2'-O-methylguanosine
aagacagatgcagagctcaatag

SEQ ID NO: 115 - RNA, 21 nt, synthetic construct
  source 1..21: mol_type = other RNA
  modified_base 1: mod_base = OTHER; note = 2'-O-methyladenosine-3'-phosphorothioate
  modified_base 2: mod_base = OTHER; note = 2'-O-methylcytidine-3'-phosphorothioate
  modified_base 3: mod_base = OTHER; note = 2'-O-methyluridine-3'-phosphate
  modified_base 4: mod_base = OTHER; note = 2'-O-methyluridine-3'-phosphate
  modified_base 5: mod_base = OTHER; note = 2'-O-methyluridine-3'-phosphate
  modified_base 6: mod_base = OTHER; note = 2'-O-methylguanosine-3'-phosphate
  modified_base 7: mod_base = OTHER; note = 2'-deoxy-2'-fluorouridine-3'-phosphate
  modified_base 8: mod_base = OTHER; note = 2'-O-methylguanosine-3'-phosphate
  modified_base 9: mod_base = OTHER; note = 2'-deoxy-2'-fluoroadenosine-3'-phosphate
  modified_base 10: mod_base = OTHER; note = 2'-deoxy-2'-fluoroadenosine-3'-phosphate
  modified_base 11: mod_base = OTHER; note = 2'-deoxy-2'-fluoroguanosine-3'-phosphate
  modified_base 12: mod_base = OTHER; note = 2'-O-methylguanosine-3'-phosphate
  modified_base 13: mod_base = OTHER; note = 2'-O-methyladenosine-3'-phosphate
  modified_base 14: mod_base = OTHER; note = 2'-O-methyluridine-3'-phosphate
  modified_base 15: mod_base = OTHER; note = 2'-O-methyluridine-3'-phosphate
  modified_base 16: mod_base = OTHER; note = 2'-O-methyladenosine-3'-phosphate
  modified_base 17: mod_base = OTHER; note = 2'-O-methylcytidine-3'-phosphate
  modified_base 18: mod_base = OTHER; note = 2'-O-methylcytidine-3'-phosphate
  modified_base 19: mod_base = OTHER; note = 2'-O-methylcytidine-3'-phosphate
  modified_base 20: mod_base = OTHER; note = 2'-O-methyluridine-3'-phosphate
  modified_base 21: mod_base = OTHER; note = 2'-O-methyluridine-3'-phosphate ((2S,4R)-1-[29-[[2-(acetylamino)-2-deoxy-beta-D-galactopyra nosyl]oxy]-14,14-bis[[3-[[3-[[5-[[2-(acetylamino)-2-deoxy-b eta-D-galactopyranosyl]oxy]-1-oxopentyl]amino]propyl]amino] -3-oxopropoxy]methyl]-1,12,19,25-tetraoxo-16-oxa-13,20,24-t riazanonacos-1-yl]-4-hydroxy-2-pyrrolidinyl)methyl ester
actttgtgaaggattaccctt

SEQ ID NO: 116 - RNA, 23 nt, synthetic construct
  source 1..23: mol_type = other RNA
  modified_base 1: mod_base = OTHER; note = 2'-O-methyladenosine-3'-phosphorothioate
  modified_base 2: mod_base = OTHER; note = 2'-deoxy-2'-fluoroadenosine-3'-phosphorothioate
  modified_base 3: mod_base = OTHER; note = 2'-O-methylguanosine-3'-phosphate
  modified_base 4: mod_base = OTHER; note = 2'-O-methylguanosine-3'-phosphate
  modified_base 5: mod_base = OTHER; note = 2'-O-methylguanosine-3'-phosphate
  modified_base 6: mod_base = OTHER; note = 2'-deoxy-2'-fluorouridine-3'-phosphate
  modified_base 7: mod_base = OTHER; note = 2'-O-methyladenosine-3'-phosphate
  modified_base 8: mod_base = OTHER; note = 2'-deoxy-2'-fluoroadenosine-3'-phosphate
  modified_base 9: mod_base = OTHER; note = 2'-deoxy-2'-fluorouridine-3'-phosphate
  modified_base 10: mod_base = OTHER; note = 2'-O-methylcytidine-3'-phosphate
  modified_base 11: mod_base = OTHER; note = 2'-O-methylcytidine-3'-phosphate
  modified_base 12: mod_base = OTHER; note = 2'-O-methyluridine-3'-phosphate
  modified_base 13: mod_base = OTHER; note = 2'-O-methyluridine-3'-phosphate
  modified_base 14: mod_base = OTHER; note = 2'-deoxy-2'-fluorocytidine-3'-phosphate
  modified_base 15: mod_base = OTHER; note = 2'-O-methyladenosine-3'-phosphate
  modified_base 16: mod_base = OTHER; note = 2'-deoxy-2'-fluorocytidine-3'-phosphate
  modified_base 17: mod_base = OTHER; note = 2'-O-methyladenosine-3'-phosphate
  modified_base 18: mod_base = OTHER; note = 2'-O-methyladenosine-3'-phosphate
  modified_base 19: mod_base = OTHER; note = 2'-O-methyladenosine-3'-phosphate
  modified_base 20: mod_base = OTHER; note = 2'-O-methylguanosine-3'-phosphate
  modified_base 21: mod_base = OTHER; note = 2'-O-methyluridine-3'-phosphorothioate
  modified_base 22: mod_base = OTHER; note = 2'-O-methylcytidine-3'-phosphorothioate
  modified_base 23: mod_base = OTHER; note = 2'-O-methyladenosine
aagggtaatccttcacaaagtca

SEQ ID NO: 117 - RNA, 21 nt, synthetic construct
  source 1..21: mol_type = other RNA
  modified_base 1: mod_base = OTHER; note = 2'-O-methylcytidine-3'-phosphorothioate
  modified_base 2: mod_base = OTHER; note = 2'-O-methyladenosine-3'-phosphorothioate
  modified_base 3: mod_base = OTHER; note = 2'-O-methylcytidine-3'-phosphate
  modified_base 4: mod_base = OTHER; note = 2'-O-methyluridine-3'-phosphate
  modified_base 5: mod_base = OTHER; note = 2'-O-methyladenosine-3'-phosphate
  modified_base 6: mod_base = OTHER; note = 2'-O-methyluridine-3'-phosphate
  modified_base 7: mod_base = OTHER; note = 2'-deoxy-2'-fluorocytidine-3'-phosphate
  modified_base 8: mod_base = OTHER; note = 2'-O-methylcytidine-3'-phosphate
  modified_base 9: mod_base = OTHER; note = 2'-deoxy-2'-fluorocytidine-3'-phosphate
  modified_base 10: mod_base = OTHER; note = 2'-deoxy-2'-fluoroadenosine-3'-phosphate
  modified_base 11: mod_base = OTHER; note = 2'-deoxy-2'-fluoroguanosine-3'-phosphate
  modified_base 12: mod_base = OTHER; note = 2'-O-methylguanosine-3'-phosphate
  modified_base 13: mod_base = OTHER; note = 2'-O-methyladenosine-3'-phosphate
  modified_base 14: mod_base = OTHER; note = 2'-O-methyladenosine-3'-phosphate
  modified_base 15: mod_base = OTHER; note = 2'-O-methyluridine-3'-phosphate
  modified_base 16: mod_base = OTHER; note = 2'-O-methyluridine-3'-phosphate
  modified_base 17: mod_base = OTHER; note = 2'-O-methyluridine-3'-phosphate
  modified_base 18: mod_base = OTHER; note = 2'-O-methylguanosine-3'-phosphate
  modified_base 19: mod_base = OTHER; note = 2'-O-methyladenosine-3'-phosphate
  modified_base 20: mod_base = OTHER; note = 2'-O-methyladenosine-3'-phosphate
  modified_base 21: mod_base = OTHER; note = 2'-O-methyluridine-3'-phosphate ((2S,4R)-1-[29-[[2-(acetylamino)-2-deoxy-beta-D-galactopyra nosyl]oxy]-14,14-bis[[3-[[3-[[5-[[2-(acetylamino)-2-deoxy-b eta-D-galactopyranosyl]oxy]-1-oxopentyl]amino]propyl]amino] -3-oxopropoxy]methyl]-1,12,19,25-tetraoxo-16-oxa-13,20,24-t riazanonacos-1-yl]-4-hydroxy-2-pyrrolidinyl)methyl ester
cactatcccaggaatttgaat

SEQ ID NO: 118 - RNA, 23 nt, synthetic construct
  source 1..23: mol_type = other RNA
  modified_base 1: mod_base = OTHER; note = 2'-O-methyladenosine-3'-phosphorothioate
  modified_base 2: mod_base = OTHER; note = 2'-deoxy-2'-fluorouridine-3'-phosphorothioate
  modified_base 3: mod_base = OTHER; note = 2'-O-methyluridine-3'-phosphate
  modified_base 4: mod_base = OTHER; note = 2'-O-methylcytidine-3'-phosphate
  modified_base 5: mod_base = OTHER; note = 2'-O-methyladenosine-3'-phosphate
  modified_base 6: mod_base = OTHER; note = 2'-deoxy-2'-fluoroadenosine-3'-phosphate
  modified_base 7: mod_base = OTHER; note = 2'-O-methyladenosine-3'-phosphate
  modified_base 8: mod_base = OTHER; note = 2'-deoxy-2'-fluorouridine-3'-phosphate
  modified_base 9: mod_base = OTHER; note = 2'-deoxy-2'-fluorouridine-3'-phosphate
  modified_base 10: mod_base = OTHER; note = 2'-O-methylcytidine-3'-phosphate
  modified_base 11: mod_base = OTHER; note = 2'-O-methylcytidine-3'-phosphate
  modified_base 12: mod_base = OTHER; note = 2'-O-methyluridine-3'-phosphate
  modified_base 13: mod_base = OTHER; note = 2'-O-methylguanosine-3'-phosphate
  modified_base 14: mod_base = OTHER; note = 2'-deoxy-2'-fluoroguanosine-3'-phosphate
  modified_base 15: mod_base = OTHER; note = 2'-O-methylguanosine-3'-phosphate
  modified_base 16: mod_base = OTHER; note = 2'-deoxy-2'-fluoroadenosine-3'-phosphate
  modified_base 17: mod_base = OTHER; note = 2'-O-methyluridine-3'-phosphate
  modified_base 18: mod_base = OTHER; note = 2'-O-methyladenosine-3'-phosphate
  modified_base 19: mod_base = OTHER; note = 2'-O-methylguanosine-3'-phosphate
  modified_base 20: mod_base = OTHER; note = 2'-O-methyluridine-3'-phosphate
  modified_base 21: mod_base = OTHER; note = 2'-O-methylguanosine-3'-phosphorothioate
  modified_base 22: mod_base = OTHER; note = 2'-O-methylguanosine-3'-phosphorothioate
  modified_base 23: mod_base = OTHER; note = 2'-O-methyladenosine
attcaaattcctgggatagtgga

SEQ ID NO: 119 - RNA, 21 nt, synthetic construct
  source 1..21: mol_type = other RNA
  modified_base 1: mod_base = OTHER; note = 2'-O-methylguanosine-3'-phosphorothioate
  modified_base 2: mod_base = OTHER; note = 2'-O-methylguanosine-3'-phosphorothioate
  modified_base 3: mod_base = OTHER; note = 2'-O-methyladenosine-3'-phosphate
  modified_base 4: mod_base = OTHER; note = 2'-O-methylcytidine-3'-phosphate
  modified_base 5: mod_base = OTHER; note = 2'-O-methyladenosine-3'-phosphate
  modified_base 6: mod_base = OTHER; note = 2'-O-methyluridine-3'-phosphate
  modified_base 7: mod_base = OTHER; note = 2'-deoxy-2'-fluoroguanosine-3'-phosphate
  modified_base 8: mod_base = OTHER; note = 2'-O-methyladenosine-3'-phosphate
  modified_base 9: mod_base = OTHER; note = 2'-deoxy-2'-fluoroadenosine-3'-phosphate
  modified_base 10: mod_base = OTHER; note = 2'-deoxy-2'-fluoroadenosine-3'-phosphate
  modified_base 11: mod_base = OTHER; note = 2'-deoxy-2'-fluorouridine-3'-phosphate
  modified_base 12: mod_base = OTHER; note = 2'-O-methyladenosine-3'-phosphate
  modified_base 13: mod_base = OTHER; note = 2'-O-methylguanosine-3'-phosphate
  modified_base 14: mod_base = OTHER; note = 2'-O-methyluridine-3'-phosphate
  modified_base 15: mod_base = OTHER; note = 2'-O-methyluridine-3'-phosphate
  modified_base 16: mod_base = OTHER; note = 2'-O-methylguanosine-3'-phosphate
  modified_base 17: mod_base = OTHER; note = 2'-O-methyluridine-3'-phosphate
  modified_base 18: mod_base = OTHER; note = 2'-O-methylcytidine-3'-phosphate
  modified_base 19: mod_base = OTHER; note = 2'-O-methylcytidine-3'-phosphate
  modified_base 20: mod_base = OTHER; note = 2'-O-methyluridine-3'-phosphate
  modified_base 21: mod_base = OTHER; note = 2'-O-methyluridine-3'-phosphate ((2S,4R)-1-[29-[[2-(acetylamino)-2-deoxy-beta-D-galactopyra nosyl]oxy]-14,14-bis[[3-[[3-[[5-[[2-(acetylamino)-2-deoxy-b eta-D-galactopyranosyl]oxy]-1-oxopentyl]amino]propyl]amino] -3-oxopropoxy]methyl]-1,12,19,25-tetraoxo-16-oxa-13,20,24-t riazanonacos-1-yl]-4-hydroxy-2-pyrrolidinyl)methyl ester
ggacatgaaatagttgtcctt

SEQ ID NO: 120 - RNA, 23 nt, synthetic construct
  source 1..23: mol_type = other RNA
  modified_base 1: mod_base = OTHER; note = 2'-O-methyladenosine-3'-phosphorothioate
  modified_base 2: mod_base = OTHER; note = 2'-deoxy-2'-fluoroadenosine-3'-phosphorothioate
  modified_base 3: mod_base = OTHER; note = 2'-O-methylguanosine-3'-phosphate
  modified_base 4: mod_base = OTHER; note = 2'-O-methylguanosine-3'-phosphate
  modified_base 5: mod_base = OTHER; note = 2'-O-methyladenosine-3'-phosphate
  modified_base 6: mod_base = OTHER; note = 2'-deoxy-2'-fluorocytidine-3'-phosphate
  modified_base 7: mod_base = OTHER; note = 2'-O-methyladenosine-3'-phosphate
  modified_base 8: mod_base = OTHER; note = 2'-deoxy-2'-fluoroadenosine-3'-phosphate
  modified_base 9: mod_base = OTHER; note = 2'-deoxy-2'-fluorocytidine-3'-phosphate
  modified_base 10: mod_base = OTHER; note = 2'-O-methyluridine-3'-phosphate
  modified_base 11: mod_base = OTHER; note = 2'-O-methyladenosine-3'-phosphate
  modified_base 12: mod_base = OTHER; note = 2'-O-methyluridine-3'-phosphate
  modified_base 13: mod_base = OTHER; note = 2'-O-methyluridine-3'-phosphate
  modified_base 14: mod_base = OTHER; note = 2'-deoxy-2'-fluorouridine-3'-phosphate
  modified_base 15: mod_base = OTHER; note = 2'-O-methylcytidine-3'-phosphate
  modified_base 16: mod_base = OTHER; note = 2'-deoxy-2'-fluoroadenosine-3'-phosphate
  modified_base 17: mod_base = OTHER; note = 2'-O-methyluridine-3'-phosphate
  modified_base 18: mod_base = OTHER; note = 2'-O-methylguanosine-3'-phosphate
  modified_base 19: mod_base = OTHER; note = 2'-O-methyluridine-3'-phosphate
  modified_base 20: mod_base = OTHER; note = 2'-O-methylcytidine-3'-phosphate
  modified_base 21: mod_base = OTHER; note = 2'-O-methylcytidine-3'-phosphorothioate
  modified_base 22: mod_base = OTHER; note = 2'-O-methylcytidine-3'-phosphorothioate
  modified_base 23: mod_base = OTHER; note = 2'-O-methylcytidine
aaggacaactatttcatgtcccc

SEQ ID NO: 121 - RNA, 21 nt, synthetic construct
  source 1..21: mol_type = other RNA
  modified_base 1: mod_base = OTHER; note = 2'-O-methylcytidine-3'-phosphorothioate
  modified_base 2: mod_base = OTHER; note = 2'-O-methyladenosine-3'-phosphorothioate
  modified_base 3: mod_base = OTHER; note = 2'-O-methyluridine-3'-phosphate
  modified_base 4: mod_base = OTHER; note = 2'-O-methyluridine-3'-phosphate
  modified_base 5: mod_base = OTHER; note = 2'-O-methyluridine-3'-phosphate
  modified_base 6: mod_base = OTHER; note = 2'-O-methyluridine-3'-phosphate
  modified_base 7: mod_base = OTHER; note = 2'-deoxy-2'-fluoroadenosine-3'-phosphate
  modified_base 8: mod_base = OTHER; note = 2'-O-methylcytidine-3'-phosphate
  modified_base 9: mod_base = OTHER; note = 2'-deoxy-2'-fluoroadenosine-3'-phosphate
  modified_base 10: mod_base = OTHER; note = 2'-deoxy-2'-fluorocytidine-3'-phosphate
  modified_base 11: mod_base = OTHER; note = 2'-deoxy-2'-fluorocytidine-3'-phosphate
  modified_base 12: mod_base = OTHER; note = 2'-O-methyluridine-3'-phosphate
  modified_base 13: mod_base = OTHER; note = 2'-O-methyluridine-3'-phosphate
  modified_base 14: mod_base = OTHER; note = 2'-O-methylguanosine-3'-phosphate
  modified_base 15: mod_base = OTHER; note = 2'-O-methyladenosine-3'-phosphate
  modified_base 16: mod_base = OTHER; note = 2'-O-methyladenosine-3'-phosphate
  modified_base 17: mod_base = OTHER; note = 2'-O-methylguanosine-3'-phosphate
  modified_base 18: mod_base = OTHER; note = 2'-O-methyladenosine-3'-phosphate
  modified_base 19: mod_base = OTHER; note = 2'-O-methylcytidine-3'-phosphate
  modified_base 20: mod_base = OTHER; note = 2'-O-methylguanosine-3'-phosphate
  modified_base 21: mod_base = OTHER; note = 2'-O-methyluridine-3'-phosphate ((2S,4R)-1-[29-[[2-(acetylamino)-2-deoxy-beta-D-galactopyra nosyl]oxy]-14,14-bis[[3-[[3-[[5-[[2-(acetylamino)-2-deoxy-b eta-D-galactopyranosyl]oxy]-1-oxopentyl]amino]propyl]amino] -3-oxopropoxy]methyl]-1,12,19,25-tetraoxo-16-oxa-13,20,24-t riazanonacos-1-yl]-4-hydroxy-2-pyrrolidinyl)methyl ester
cattttacaccttgaagacgt

SEQ ID NO: 122 - RNA, 23 nt, synthetic construct
  source 1..23: mol_type = other RNA
  modified_base 1: mod_base = OTHER; note = 2'-O-methyladenosine-3'-phosphorothioate
  modified_base 2: mod_base = OTHER; note = 2'-deoxy-2'-fluorocytidine-3'-phosphorothioate
  modified_base 3: mod_base = OTHER; note = 2'-O-methylguanosine-3'-phosphate
  modified_base 4: mod_base = OTHER; note = 2'-O-methyluridine-3'-phosphate
  modified_base 5: mod_base = OTHER; note = 2'-O-methylcytidine-3'-phosphate
  modified_base 6: mod_base = OTHER; note = 2'-deoxy-2'-fluorouridine-3'-phosphate
  modified_base 7: mod_base = OTHER; note = 2'-O-methyluridine-3'-phosphate
  modified_base 8: mod_base = OTHER; note = 2'-deoxy-2'-fluorocytidine-3'-phosphate
  modified_base 9: mod_base = OTHER; note = 2'-deoxy-2'-fluoroadenosine-3'-phosphate
  modified_base 10: mod_base = OTHER; note = 2'-O-methyladenosine-3'-phosphate
  modified_base 11: mod_base = OTHER; note = 2'-O-methylguanosine-3'-phosphate
  modified_base 12: mod_base = OTHER; note = 2'-O-methylguanosine-3'-phosphate
  modified_base 13: mod_base = OTHER; note = 2'-O-methyluridine-3'-phosphate
  modified_base 14: mod_base = OTHER; note = 2'-deoxy-2'-fluoroguanosine-3'-phosphate
  modified_base 15: mod_base = OTHER; note = 2'-O-methyluridine-3'-phosphate
  modified_base 16: mod_base = OTHER; note = 2'-deoxy-2'-fluoroadenosine-3'-phosphate
  modified_base 17: mod_base = OTHER; note = 2'-O-methyladenosine-3'-phosphate
  modified_base 18: mod_base = OTHER; note = 2'-O-methyladenosine-3'-phosphate
  modified_base 19: mod_base = OTHER; note = 2'-O-methyladenosine-3'-phosphate
  modified_base 20: mod_base = OTHER; note = 2'-O-methyluridine-3'-phosphate
  modified_base 21: mod_base = OTHER; note = 2'-O-methylguanosine-3'-phosphorothioate
  modified_base 22: mod_base = OTHER; note = 2'-O-methylcytidine-3'-phosphorothioate
  modified_base 23: mod_base = OTHER; note = 2'-O-methyluridine
acgtcttcaaggtgtaaaatgct

SEQ ID NO: 123 - RNA, 21 nt, synthetic construct
  source 1..21: mol_type = other RNA
  modified_base 1: mod_base = OTHER; note = 2'-O-methyluridine-3'-phosphorothioate
  modified_base 2: mod_base = OTHER; note = 2'-O-methyluridine-3'-phosphorothioate
  modified_base 3: mod_base = OTHER; note = 2'-O-methyluridine-3'-phosphate
  modified_base 4: mod_base = OTHER; note = 2'-O-methyladenosine-3'-phosphate
  modified_base 5: mod_base = OTHER; note = 2'-O-methylcytidine-3'-phosphate
  modified_base 6: mod_base = OTHER; note = 2'-O-methyladenosine-3'-phosphate
  modified_base 7: mod_base = OTHER; note = 2'-deoxy-2'-fluorocytidine-3'-phosphate
  modified_base 8: mod_base = OTHER; note = 2'-O-methylcytidine-3'-phosphate
  modified_base 9: mod_base = OTHER; note = 2'-deoxy-2'-fluorouridine-3'-phosphate
  modified_base 10: mod_base = OTHER; note = 2'-deoxy-2'-fluorouridine-3'-phosphate
  modified_base 11: mod_base = OTHER; note = 2'-deoxy-2'-fluoroguanosine-3'-phosphate
  modified_base 12: mod_base = OTHER; note = 2'-O-methyladenosine-3'-phosphate
  modified_base 13: mod_base = OTHER; note = 2'-O-methyladenosine-3'-phosphate
  modified_base 14: mod_base = OTHER; note = 2'-O-methylguanosine-3'-phosphate
  modified_base 15: mod_base = OTHER; note = 2'-O-methyladenosine-3'-phosphate
  modified_base 16: mod_base = OTHER; note = 2'-O-methylcytidine-3'-phosphate
  modified_base 17: mod_base = OTHER; note = 2'-O-methylguanosine-3'-phosphate
  modified_base 18: mod_base = OTHER; note = 2'-O-methyluridine-3'-phosphate
  modified_base 19: mod_base = OTHER; note = 2'-O-methyladenosine-3'-phosphate
  modified_base 20: mod_base = OTHER; note = 2'-O-methylcytidine-3'-phosphate
  modified_base 21: mod_base = OTHER; note = 2'-O-methyluridine-3'-phosphate ((2S,4R)-1-[29-[[2-(acetylamino)-2-deoxy-beta-D-galactopyra nosyl]oxy]-14,14-bis[[3-[[3-[[5-[[2-(acetylamino)-2-deoxy-b eta-D-galactopyranosyl]oxy]-1-oxopentyl]amino]propyl]amino] -3-oxopropoxy]methyl]-1,12,19,25-tetraoxo-16-oxa-13,20,24-t riazanonacos-1-yl]-4-hydroxy-2-pyrrolidinyl)methyl ester
tttacaccttgaagacgtact

SEQ ID NO: 124 - RNA, 23 nt, synthetic construct
  source 1..23: mol_type = other RNA
  modified_base 1: mod_base = OTHER; note = 2'-O-methyladenosine-3'-phosphorothioate
  modified_base 2: mod_base = OTHER; note = 2'-deoxy-2'-fluoroguanosine-3'-phosphorothioate
  modified_base 3: mod_base = OTHER; note = 2'-O-methyluridine-3'-phosphate
  modified_base 4: mod_base = OTHER; note = 2'-O-methyladenosine-3'-phosphate
  modified_base 5: mod_base = OTHER; note = 2'-O-methylcytidine-3'-phosphate
  modified_base 6: mod_base = OTHER; note = 2'-deoxy-2'-fluoroguanosine-3'-phosphate
  modified_base 7: mod_base = OTHER; note = 2'-O-methyluridine-3'-phosphate
  modified_base 8: mod_base = OTHER; note = 2'-deoxy-2'-fluorocytidine-3'-phosphate
  modified_base 9: mod_base = OTHER; note = 2'-deoxy-2'-fluorouridine-3'-phosphate
  modified_base 10: mod_base = OTHER; note = 2'-O-methyluridine-3'-phosphate
  modified_base 11: mod_base = OTHER; note = 2'-O-methylcytidine-3'-phosphate
  modified_base 12: mod_base = OTHER; note = 2'-O-methyladenosine-3'-phosphate
  modified_base 13: mod_base = OTHER; note = 2'-O-methyladenosine-3'-phosphate
  modified_base 14: mod_base = OTHER; note = 2'-deoxy-2'-fluoroguanosine-3'-phosphate
  modified_base 15: mod_base = OTHER; note = 2'-O-methylguanosine-3'-phosphate
  modified_base 16: mod_base = OTHER; note = 2'-deoxy-2'-fluorouridine-3'-phosphate
  modified_base 17: mod_base = OTHER; note = 2'-O-methylguanosine-3'-phosphate
  modified_base 18: mod_base = OTHER; note = 2'-O-methyluridine-3'-phosphate
  modified_base 19: mod_base = OTHER; note = 2'-O-methyladenosine-3'-phosphate
  modified_base 20: mod_base = OTHER; note = 2'-O-methyladenosine-3'-phosphate
  modified_base 21: mod_base = OTHER; note = 2'-O-methyladenosine-3'-phosphorothioate
  modified_base 22: mod_base = OTHER; note = 2'-O-methyladenosine-3'-phosphorothioate
  modified_base 23: mod_base = OTHER; note = 2'-O-methyluridine
agtacgtcttcaaggtgtaaaat

SEQ ID NO: 125 - RNA, 21 nt, synthetic construct
  source 1..21: mol_type = other RNA
  modified_base 1: mod_base = OTHER; note = 2'-O-methyladenosine-3'-phosphorothioate
  modified_base 2: mod_base = OTHER; note = 2'-O-methyladenosine-3'-phosphorothioate
  modified_base 3: mod_base = OTHER; note = 2'-O-methylguanosine-3'-phosphate
  modified_base 4: mod_base = OTHER; note = 2'-O-methyladenosine-3'-phosphate
  modified_base 5: mod_base = OTHER; note = 2'-O-methyladenosine-3'-phosphate
  modified_base 6: mod_base = OTHER; note = 2'-O-methylcytidine-3'-phosphate
  modified_base 7: mod_base = OTHER; note = 2'-deoxy-2'-fluoroadenosine-3'-phosphate
  modified_base 8: mod_base = OTHER; note = 2'-O-methyluridine-3'-phosphate
  modified_base 9: mod_base = OTHER; note = 2'-deoxy-2'-fluoroguanosine-3'-phosphate
  modified_base 10: mod_base = OTHER; note = 2'-deoxy-2'-fluorocytidine-3'-phosphate
  modified_base 11: mod_base = OTHER; note = 2'-deoxy-2'-fluorouridine-3'-phosphate
  modified_base 12: mod_base = OTHER; note = 2'-O-methylcytidine-3'-phosphate
  modified_base 13: mod_base = OTHER; note = 2'-O-methyladenosine-3'-phosphate
  modified_base 14: mod_base = OTHER; note = 2'-O-methyluridine-3'-phosphate
  modified_base 15: mod_base = OTHER; note = 2'-O-methyluridine-3'-phosphate
  modified_base 16: mod_base = OTHER; note = 2'-O-methylguanosine-3'-phosphate
  modified_base 17: mod_base = OTHER; note = 2'-O-methylcytidine-3'-phosphate
  modified_base 18: mod_base = OTHER; note = 2'-O-methylcytidine-3'-phosphate
  modified_base 19: mod_base = OTHER; note = 2'-O-methyluridine-3'-phosphate
  modified_base 20: mod_base = OTHER; note = 2'-O-methyluridine-3'-phosphate
  modified_base 21: mod_base = OTHER; note = 2'-O-methyluridine-3'-phosphate ((2S,4R)-1-[29-[[2-(acetylamino)-2-deoxy-beta-D-galactopyra nosyl]oxy]-14,14-bis[[3-[[3-[[5-[[2-(acetylamino)-2-deoxy-b eta-D-galactopyranosyl]oxy]-1-oxopentyl]amino]propyl]amino] -3-oxopropoxy]methyl]-1,12,19,25-tetraoxo-16-oxa-13,20,24-t riazanonacos-1-yl]-4-hydroxy-2-pyrrolidinyl)methyl ester
aagaacatgctcattgccttt

SEQ ID NO: 126 - RNA, 23 nt, synthetic construct
  source 1..23: mol_type = other RNA
  modified_base 1: mod_base = OTHER; note = 2'-O-methyladenosine-3'-phosphorothioate
  modified_base 2: mod_base = OTHER; note = 2'-deoxy-2'-fluoroadenosine-3'-phosphorothioate
  modified_base 3: mod_base = OTHER; note = 2'-O-methyladenosine-3'-phosphate
  modified_base 4: mod_base = OTHER; note = 2'-O-methylguanosine-3'-phosphate
  modified_base 5: mod_base = OTHER; note = 2'-O-methylguanosine-3'-phosphate
  modified_base 6: mod_base = OTHER; note = 2'-deoxy-2'-fluorocytidine-3'-phosphate
  modified_base 7: mod_base = OTHER; note = 2'-O-methyladenosine-3'-phosphate
  modified_base 8: mod_base = OTHER; note = 2'-deoxy-2'-fluoroadenosine-3'-phosphate
  modified_base 9: mod_base = OTHER; note = 2'-deoxy-2'-fluorouridine-3'-phosphate
  modified_base 10: mod_base = OTHER; note = 2'-O-methylguanosine-3'-phosphate
  modified_base 11: mod_base = OTHER; note = 2'-O-methyladenosine-3'-phosphate
  modified_base 12: mod_base = OTHER; note = 2'-O-methylguanosine-3'-phosphate
  modified_base 13: mod_base = OTHER; note = 2'-O-methylcytidine-3'-phosphate
  modified_base 14: mod_base = OTHER; note = 2'-deoxy-2'-fluoroadenosine-3'-phosphate
  modified_base 15: mod_base = OTHER; note = 2'-O-methyluridine-3'-phosphate
  modified_base 16: mod_base = OTHER; note = 2'-deoxy-2'-fluoroguanosine-3'-phosphate
  modified_base 17: mod_base = OTHER; note = 2'-O-methyluridine-3'-phosphate
  modified_base 18: mod_base = OTHER; note = 2'-O-methyluridine-3'-phosphate
  modified_base 19: mod_base = OTHER; note = 2'-O-methylcytidine-3'-phosphate
  modified_base 20: mod_base = OTHER; note = 2'-O-methyluridine-3'-phosphate
  modified_base 21: mod_base = OTHER; note = 2'-O-methyluridine-3'-phosphorothioate
  modified_base 22: mod_base = OTHER; note = 2'-O-methylcytidine-3'-phosphorothioate
  modified_base 23: mod_base = OTHER; note = 2'-O-methyladenosine
aaaggcaatgagcatgttcttca

SEQ ID NO: 127 - RNA, 21 nt, synthetic construct
  source 1..21: mol_type = other RNA
  modified_base 1: mod_base = OTHER; note = 2'-O-methyluridine-3'-phosphorothioate
  modified_base 2: mod_base = OTHER; note = 2'-O-methyluridine-3'-phosphorothioate
  modified_base 3: mod_base = OTHER; note = 2'-O-methyluridine-3'-phosphate
  modified_base 4: mod_base = OTHER; note = 2'-O-methylcytidine-3'-phosphate
  modified_base 5: mod_base = OTHER; note = 2'-O-methyladenosine-3'-phosphate
  modified_base 6: mod_base = OTHER; note = 2'-O-methylcytidine-3'-phosphate
  modified_base 7: mod_base = OTHER; note = 2'-deoxy-2'-fluoroadenosine-3'-phosphate
  modified_base 8: mod_base = OTHER; note = 2'-O-methylguanosine-3'-phosphate
  modified_base 9: mod_base = OTHER; note = 2'-deoxy-2'-fluoroadenosine-3'-phosphate
  modified_base 10: mod_base = OTHER; note = 2'-deoxy-2'-fluoroadenosine-3'-phosphate
  modified_base 11: mod_base = OTHER; note = 2'-deoxy-2'-fluorocytidine-3'-phosphate
  modified_base 12: mod_base = OTHER; note = 2'-O-methyluridine-3'-phosphate
  modified_base 13: mod_base = OTHER; note = 2'-O-methyluridine-3'-phosphate
  modified_base 14: mod_base = OTHER; note = 2'-O-methyluridine-3'-phosphate
  modified_base 15: mod_base = OTHER; note = 2'-O-methylcytidine-3'-phosphate
  modified_base 16: mod_base = OTHER; note = 2'-O-methyluridine-3'-phosphate
  modified_base 17: mod_base = OTHER; note = 2'-O-methylguanosine-3'-phosphate
  modified_base 18: mod_base = OTHER; note = 2'-O-methyluridine-3'-phosphate
  modified_base 19: mod_base = OTHER; note = 2'-O-methylguanosine-3'-phosphate
  modified_base 20: mod_base = OTHER; note = 2'-O-methylcytidine-3'-phosphate
  modified_base 21: mod_base = OTHER; note = 2'-O-methyluridine-3'-phosphate ((2S,4R)-1-[29-[[2-(acetylamino)-2-deoxy-beta-D-galactopyra nosyl]oxy]-14,14-bis[[3-[[3-[[5-[[2-(acetylamino)-2-deoxy-b eta-D-galactopyranosyl]oxy]-1-oxopentyl]amino]propyl]amino] -3-oxopropoxy]methyl]-1,12,19,25-tetraoxo-16-oxa-13,20,24-t riazanonacos-1-yl]-4-hydroxy-2-pyrrolidinyl)methyl ester
tttcacagaactttctgtgct

SEQ ID NO: 128 - RNA, 23 nt, synthetic construct
  source 1..23: mol_type = other RNA
  modified_base 1: mod_base = OTHER; note = 2'-O-methyladenosine-3'-phosphorothioate
  modified_base 2: mod_base = OTHER; note = 2'-deoxy-2'-fluoroguanosine-3'-phosphorothioate
  modified_base 3: mod_base = OTHER; note = 2'-O-methylcytidine-3'-phosphate
  modified_base 4: mod_base = OTHER; note = 2'-O-methyladenosine-3'-phosphate
  modified_base 5: mod_base = OTHER; note = 2'-O-methylcytidine-3'-phosphate
  modified_base 6: mod_base = OTHER; note = 2'-deoxy-2'-fluoroadenosine-3'-phosphate
  modified_base 7: mod_base = OTHER; note = 2'-O-methylguanosine-3'-phosphate
  modified_base 8: mod_base = OTHER; note = 2'-deoxy-2'-fluoroadenosine-3'-phosphate
  modified_base 9: mod_base = OTHER; note = 2'-deoxy-2'-fluoroadenosine-3'-phosphate
  modified_base 10: mod_base = OTHER; note = 2'-O-methyladenosine-3'-phosphate
  modified_base 11: mod_base = OTHER; note = 2'-O-methylguanosine-3'-phosphate
  modified_base 12: mod_base = OTHER; note = 2'-O-methyluridine-3'-phosphate
  modified_base 13: mod_base = OTHER; note = 2'-O-methyluridine-3'-phosphate
  modified_base 14: mod_base = OTHER; note = 2'-deoxy-2'-fluorocytidine-3'-phosphate
  modified_base 15: mod_base = OTHER; note = 2'-O-methyluridine-3'-phosphate
  modified_base 16: mod_base = OTHER; note = 2'-deoxy-2'-fluoroguanosine-3'-phosphate
  modified_base 17: mod_base = OTHER; note = 2'-O-methyluridine-3'-phosphate
  modified_base 18: mod_base = OTHER; note = 2'-O-methylguanosine-3'-phosphate
  modified_base 19: mod_base = OTHER; note = 2'-O-methyladenosine-3'-phosphate
  modified_base 20: mod_base = OTHER; note = 2'-O-methyladenosine-3'-phosphate
  modified_base 21: mod_base = OTHER; note = 2'-O-methyladenosine-3'-phosphorothioate
  modified_base 22: mod_base = OTHER; note = 2'-O-methyladenosine-3'-phosphorothioate
  modified_base 23: mod_base = OTHER; note = 2'-O-methylguanosine
agcacagaaagttctgtgaaaag

SEQ ID NO: 129 - RNA, 21 nt, synthetic construct
  source 1..21: mol_type = other RNA
  modified_base 1: mod_base = OTHER; note = 2'-O-methyluridine-3'-phosphorothioate
  modified_base 2: mod_base = OTHER; note = 2'-O-methylcytidine-3'-phosphorothioate
  modified_base 3: mod_base = OTHER; note = 2'-O-methyladenosine-3'-phosphate
  modified_base 4: mod_base = OTHER; note = 2'-O-methylcytidine-3'-phosphate
  modified_base 5: mod_base = OTHER; note = 2'-O-methyladenosine-3'-phosphate
  modified_base 6: mod_base = OTHER; note = 2'-O-methylguanosine-3'-phosphate
  modified_base 7: mod_base = OTHER; note = 2'-deoxy-2'-fluoroadenosine-3'-phosphate
  modified_base 8: mod_base = OTHER; note = 2'-O-methyladenosine-3'-phosphate
  modified_base 9: mod_base = OTHER; note = 2'-deoxy-2'-fluorocytidine-3'-phosphate
  modified_base 10: mod_base = OTHER; note = 2'-deoxy-2'-fluorouridine-3'-phosphate
  modified_base 11: mod_base = OTHER; note = 2'-deoxy-2'-fluorouridine-3'-phosphate
  modified_base 12: mod_base = OTHER; note = 2'-O-methyluridine-3'-phosphate
  modified_base 13: mod_base = OTHER; note = 2'-O-methylcytidine-3'-phosphate
  modified_base 14: mod_base = OTHER; note = 2'-O-methyluridine-3'-phosphate
  modified_base 15: mod_base = OTHER; note = 2'-O-methylguanosine-3'-phosphate
  modified_base 16: mod_base = OTHER; note = 2'-O-methyluridine-3'-phosphate
  modified_base 17: mod_base = OTHER; note = 2'-O-methylguanosine-3'-phosphate
  modified_base 18: mod_base = OTHER; note = 2'-O-methylcytidine-3'-phosphate
  modified_base 19: mod_base = OTHER; note = 2'-O-methylguanosine-3'-phosphate
  modified_base 20: mod_base = OTHER; note = 2'-O-methyladenosine-3'-phosphate
  modified_base 21: mod_base = OTHER; note = 2'-O-methyluridine-3'-phosphate ((2S,4R)-1-[29-[[2-(acetylamino)-2-deoxy-beta-D-galactopyra nosyl]oxy]-14,14-bis[[3-[[3-[[5-[[2-(acetylamino)-2-deoxy-b eta-D-galactopyranosyl]oxy]-1-oxopentyl]amino]propyl]amino] -3-oxopropoxy]methyl]-1,12,19,25-tetraoxo-16-oxa-13,20,24-t riazanonacos-1-yl]-4-hydroxy-2-pyrrolidinyl)methyl ester
tcacagaactttctgtgcgat

SEQ ID NO: 130 - RNA, 23 nt, synthetic construct
  source 1..23: mol_type = other RNA
  modified_base 1: mod_base = OTHER; note = 2'-O-methyladenosine-3'-phosphorothioate
  modified_base 2: mod_base = OTHER; note = 2'-deoxy-2'-fluorouridine-3'-phosphorothioate
  modified_base 3: mod_base = OTHER; note = 2'-O-methylcytidine-3'-phosphate
  modified_base 4: mod_base = OTHER; note = 2'-O-methylguanosine-3'-phosphate
  modified_base 5: mod_base = OTHER; note = 2'-O-methylcytidine-3'-phosphate
  modified_base 6: mod_base = OTHER; note = 2'-deoxy-2'-fluoroadenosine-3'-phosphate
  modified_base 7: mod_base = OTHER; note = 2'-O-methylcytidine-3'-phosphate
  modified_base 8: mod_base = OTHER; note = 2'-deoxy-2'-fluoroadenosine-3'-phosphate
  modified_base 9: mod_base = OTHER; note = 2'-deoxy-2'-fluoroguanosine-3'-phosphate
  modified_base 10: mod_base = OTHER; note = 2'-O-methyladenosine-3'-phosphate
  modified_base 11: mod_base = OTHER; note = 2'-O-methyladenosine-3'-phosphate
  modified_base 12: mod_base = OTHER; note = 2'-O-methyladenosine-3'-phosphate
  modified_base 13: mod_base = OTHER; note = 2'-O-methylguanosine-3'-phosphate
  modified_base 14: mod_base = OTHER; note = 2'-deoxy-2'-fluorouridine-3'-phosphate
  modified_base 15: mod_base = OTHER; note = 2'-O-methyluridine-3'-phosphate
  modified_base 16: mod_base = OTHER; note = 2'-deoxy-2'-fluorocytidine-3'-phosphate
  modified_base 17: mod_base = OTHER; note = 2'-O-methyluridine-3'-phosphate
  modified_base 18: mod_base = OTHER; note = 2'-O-methylguanosine-3'-phosphate
  modified_base 19: mod_base = OTHER; note = 2'-O-methyluridine-3'-phosphate
  modified_base 20: mod_base = OTHER; note = 2'-O-methylguanosine-3'-phosphate
  modified_base 21: mod_base = OTHER; note = 2'-O-methyladenosine-3'-phosphorothioate
  modified_base 22: mod_base = OTHER; note = 2'-O-methyladenosine-3'-phosphorothioate
  modified_base 23: mod_base = OTHER; note = 2'-O-methyladenosine
atcgcacagaaagttctgtgaaa

SEQ ID NO: 131 - RNA, 21 nt, synthetic construct
  source 1..21: mol_type = other RNA
  modified_base 1: mod_base = OTHER; note = 2'-O-methyluridine-3'-phosphorothioate
  modified_base 2: mod_base = OTHER; note = 2'-O-methylcytidine-3'-phosphorothioate
  modified_base 3: mod_base = OTHER; note = 2'-O-methylcytidine-3'-phosphate
  modified_base 4: mod_base = OTHER; note = 2'-O-methyladenosine-3'-phosphate
  modified_base 5: mod_base = OTHER; note = 2'-O-methylcytidine-3'-phosphate
  modified_base 6: mod_base = OTHER; note = 2'-O-methyluridine-3'-phosphate
  modified_base 7: mod_base = OTHER; note = 2'-deoxy-2'-fluoroadenosine-3'-phosphate
  modified_base 8: mod_base = OTHER; note = 2'-O-methyluridine-3'-phosphate
  modified_base 9: mod_base = OTHER; note = 2'-deoxy-2'-fluorocytidine-3'-phosphate
  modified_base 10: mod_base = OTHER; note = 2'-deoxy-2'-fluorocytidine-3'-phosphate
  modified_base 11: mod_base = OTHER; note = 2'-deoxy-2'-fluorocytidine-3'-phosphate
  modified_base 12: mod_base = OTHER; note = 2'-O-methyladenosine-3'-phosphate
  modified_base 13: mod_base = OTHER; note = 2'-O-methylguanosine-3'-phosphate
  modified_base 14: mod_base = OTHER; note = 2'-O-methylguanosine-3'-phosphate
  modified_base 15: mod_base = OTHER; note = 2'-O-methyladenosine-3'-phosphate
  modified_base 16: mod_base = OTHER; note = 2'-O-methyladenosine-3'-phosphate
  modified_base 17: mod_base = OTHER; note = 2'-O-methyluridine-3'-phosphate
  modified_base 18: mod_base = OTHER; note = 2'-O-methyluridine-3'-phosphate
  modified_base 19: mod_base = OTHER; note = 2'-O-methyluridine-3'-phosphate
  modified_base 20: mod_base = OTHER; note = 2'-O-methylguanosine-3'-phosphate
  modified_base 21: mod_base = OTHER; note = 2'-O-methyluridine-3'-phosphate ((2S,4R)-1-[29-[[2-(acetylamino)-2-deoxy-beta-D-galactopyra nosyl]oxy]-14,14-bis[[3-[[3-[[5-[[2-(acetylamino)-2-deoxy-b eta-D-galactopyranosyl]oxy]-1-oxopentyl]amino]propyl]amino] -3-oxopropoxy]methyl]-1,12,19,25-tetraoxo-16-oxa-13,20,24-t riazanonacos-1-yl]-4-hydroxy-2-pyrrolidinyl)methyl ester
tccactatcccaggaatttgt

SEQ ID NO: 132 - RNA, 23 nt, synthetic construct
  source 1..23: mol_type = other RNA
  modified_base 1: mod_base = OTHER; note = 2'-O-methyladenosine-3'-phosphorothioate
  modified_base 2: mod_base = OTHER; note = 2'-deoxy-2'-fluorocytidine-3'-phosphorothioate
  modified_base 3: mod_base = OTHER; note = 2'-O-methyladenosine-3'-phosphate
  modified_base 4: mod_base = OTHER; note = 2'-O-methyladenosine-3'-phosphate
  modified_base 5: mod_base = OTHER; note = 2'-O-methyladenosine-3'-phosphate
  modified_base 6: mod_base = OTHER; note = 2'-deoxy-2'-fluorouridine-3'-phosphate
  modified_base 7: mod_base = OTHER; note = 2'-O-methyluridine-3'-phosphate
  modified_base 8: mod_base = OTHER; note = 2'-deoxy-2'-fluorocytidine-3'-phosphate
  modified_base 9: mod_base = OTHER; note = 2'-deoxy-2'-fluorocytidine-3'-phosphate
  modified_base 10: mod_base = OTHER; note = 2'-O-methyluridine-3'-phosphate
  modified_base 11: mod_base = OTHER; note = 2'-O-methylguanosine-3'-phosphate
  modified_base 12: mod_base = OTHER; note = 2'-O-methylguanosine-3'-phosphate
  modified_base 13: mod_base = OTHER; note = 2'-O-methylguanosine-3'-phosphate
  modified_base 14: mod_base = OTHER; note = 2'-deoxy-2'-fluoroadenosine-3'-phosphate
  modified_base 15: mod_base = OTHER; note = 2'-O-methyluridine-3'-phosphate
  modified_base 16: mod_base = OTHER; note = 2'-deoxy-2'-fluoroadenosine-3'-phosphate
  modified_base 17: mod_base = OTHER; note = 2'-O-methylguanosine-3'-phosphate
  modified_base 18: mod_base = OTHER; note = 2'-O-methyluridine-3'-phosphate
  modified_base 19: mod_base = OTHER; note = 2'-O-methylguanosine-3'-phosphate
  modified_base 20: mod_base = OTHER; note = 2'-O-methylguanosine-3'-phosphate
  modified_base 21: mod_base = OTHER; note = 2'-O-methyladenosine-3'-phosphorothioate
  modified_base 22: mod_base = OTHER; note = 2'-O-methyluridine-3'-phosphorothioate
  modified_base 23: mod_base = OTHER; note = 2'-O-methyluridine
acaaattcctgggatagtggatt

SEQ ID NO: 133 - RNA, 21 nt, synthetic construct
  source 1..21: mol_type = other RNA
  modified_base 1: mod_base = OTHER; note = 2'-O-methylcytidine-3'-phosphorothioate
  modified_base 2: mod_base = OTHER; note = 2'-O-methylcytidine-3'-phosphorothioate
  modified_base 3: mod_base = OTHER; note = 2'-O-methyladenosine-3'-phosphate
  modified_base 4: mod_base = OTHER; note = 2'-O-methylcytidine-3'-phosphate
  modified_base 5: mod_base = OTHER; note = 2'-O-methyluridine-3'-phosphate
  modified_base 6: mod_base = OTHER; note = 2'-O-methyladenosine-3'-phosphate
  modified_base 7: mod_base = OTHER; note = 2'-deoxy-2'-fluorouridine-3'-phosphate
  modified_base 8: mod_base = OTHER; note = 2'-O-methylcytidine-3'-phosphate
  modified_base 9: mod_base = OTHER; note = 2'-deoxy-2'-fluorocytidine-3'-phosphate
  modified_base 10: mod_base = OTHER; note = 2'-deoxy-2'-fluorocytidine-3'-phosphate
  modified_base 11: mod_base = OTHER; note = 2'-deoxy-2'-fluoroadenosine-3'-phosphate
  modified_base 12: mod_base = OTHER; note = 2'-O-methylguanosine-3'-phosphate
  modified_base 13: mod_base = OTHER; note = 2'-O-methylguanosine-3'-phosphate
  modified_base 14: mod_base = OTHER; note = 2'-O-methyladenosine-3'-phosphate
  modified_base 15: mod_base = OTHER; note = 2'-O-methyladenosine-3'-phosphate
  modified_base 16: mod_base = OTHER; note = 2'-O-methyluridine-3'-phosphate
  modified_base 17: mod_base = OTHER; note = 2'-O-methyluridine-3'-phosphate
  modified_base 18: mod_base = OTHER; note = 2'-O-methyluridine-3'-phosphate
  modified_base 19: mod_base = OTHER; note = 2'-O-methylguanosine-3'-phosphate
  modified_base 20: mod_base = OTHER; note = 2'-O-methyladenosine-3'-phosphate
  modified_base 21: mod_base = OTHER; note = 2'-O-methyluridine-3'-phosphate ((2S,4R)-1-[29-[[2-(acetylamino)-2-deoxy-beta-D-galactopyra nosyl]oxy]-14,14-bis[[3-[[3-[[5-[[2-(acetylamino)-2-deoxy-b eta-D-galactopyranosyl]oxy]-1-oxopentyl]amino]propyl]amino] -3-oxopropoxy]methyl]-1,12,19,25-tetraoxo-16-oxa-13,20,24-t riazanonacos-1-yl]-4-hydroxy-2-pyrrolidinyl)methyl ester
ccactatcccaggaatttgat

SEQ ID NO: 134 - RNA, 23 nt, synthetic construct
  source 1..23: mol_type = other RNA
  modified_base 1: mod_base = OTHER; note = 2'-O-methyladenosine-3'-phosphorothioate
  modified_base 2: mod_base = OTHER; note = 2'-deoxy-2'-fluorouridine-3'-phosphorothioate
  modified_base 3: mod_base = OTHER; note = 2'-O-methylcytidine-3'-phosphate
  modified_base 4: mod_base = OTHER; note = 2'-O-methyladenosine-3'-phosphate
  modified_base 5: mod_base = OTHER; note = 2'-O-methyladenosine-3'-phosphate
  modified_base 6: mod_base = OTHER; note = 2'-deoxy-2'-fluoroadenosine-3'-phosphate
  modified_base 7: mod_base = OTHER; note = 2'-O-methyluridine-3'-phosphate
  modified_base 8: mod_base = OTHER; note = 2'-deoxy-2'-fluorouridine-3'-phosphate
  modified_base 9: mod_base = OTHER; note = 2'-deoxy-2'-fluorocytidine-3'-phosphate
  modified_base 10: mod_base = OTHER; note = 2'-O-methylcytidine-3'-phosphate
  modified_base 11: mod_base = OTHER; note = 2'-O-methyluridine-3'-phosphate
  modified_base 12: mod_base = OTHER; note = 2'-O-methylguanosine-3'-phosphate
  modified_base 13: mod_base = OTHER; note = 2'-O-methylguanosine-3'-phosphate
  modified_base 14: mod_base = OTHER; note = 2'-deoxy-2'-fluoroguanosine-3'-phosphate
  modified_base 15: mod_base = OTHER; note = 2'-O-methyladenosine-3'-phosphate
  modified_base 16: mod_base = OTHER; note = 2'-deoxy-2'-fluorouridine-3'-phosphate
  modified_base 17: mod_base = OTHER; note = 2'-O-methyladenosine-3'-phosphate
  modified_base 18: mod_base = OTHER; note = 2'-O-methylguanosine-3'-phosphate
  modified_base 19: mod_base = OTHER; note = 2'-O-methyluridine-3'-phosphate
  modified_base 20: mod_base = OTHER; note = 2'-O-methylguanosine-3'-phosphate
  modified_base 21: mod_base = OTHER; note = 2'-O-methylguanosine-3'-phosphorothioate
  modified_base 22: mod_base = OTHER; note = 2'-O-methyladenosine-3'-phosphorothioate
  modified_base 23: mod_base = OTHER; note = 2'-O-methyluridine
atcaaattcctgggatagtggat

SEQ ID NO: 135 - RNA, 21 nt, synthetic construct
  source 1..21: mol_type = other RNA
  modified_base 1: mod_base = OTHER; note = 2'-O-methyladenosine-3'-phosphorothioate
  modified_base 2: mod_base = OTHER; note = 2'-O-methylcytidine-3'-phosphorothioate
  modified_base 3: mod_base = OTHER; note = 2'-O-methyluridine-3'-phosphate
  modified_base 4: mod_base = OTHER; note = 2'-O-methyladenosine-3'-phosphate
  modified_base 5: mod_base = OTHER; note = 2'-O-methyluridine-3'-phosphate
  modified_base 6: mod_base = OTHER; note = 2'-O-methylcytidine-3'-phosphate
  modified_base 7: mod_base = OTHER; note = 2'-deoxy-2'-fluorocytidine-3'-phosphate
  modified_base 8: mod_base = OTHER; note = 2'-O-methylcytidine-3'-phosphate
  modified_base 9: mod_base = OTHER; note = 2'-deoxy-2'-fluoroadenosine-3'-phosphate
  modified_base 10: mod_base = OTHER; note = 2'-deoxy-2'-fluoroguanosine-3'-phosphate
  modified_base 11: mod_base = OTHER; note = 2'-deoxy-2'-fluoroguanosine-3'-phosphate
  modified_base 12: mod_base = OTHER; note = 2'-O-methyladenosine-3'-phosphate
  modified_base 13: mod_base = OTHER; note = 2'-O-methyladenosine-3'-phosphate
  modified_base 14: mod_base = OTHER; note = 2'-O-methyluridine-3'-phosphate
  modified_base 15: mod_base = OTHER; note = 2'-O-methyluridine-3'-phosphate
  modified_base 16: mod_base = OTHER; note = 2'-O-methyluridine-3'-phosphate
  modified_base 17: mod_base = OTHER; note = 2'-O-methylguanosine-3'-phosphate
  modified_base 18: mod_base = OTHER; note = 2'-O-methyladenosine-3'-phosphate
  modified_base 19: mod_base = OTHER; note = 2'-O-methyladenosine-3'-phosphate
  modified_base 20: mod_base = OTHER; note = 2'-O-methylguanosine-3'-phosphate
  modified_base 21: mod_base = OTHER; note = 2'-O-methyluridine-3'-phosphate ((2S,4R)-1-[29-[[2-(acetylamino)-2-deoxy-beta-D-galactopyra nosyl]oxy]-14,14-bis[[3-[[3-[[5-[[2-(acetylamino)-2-deoxy-b eta-D-galactopyranosyl]oxy]-1-oxopentyl]amino]propyl]amino] -3-oxopropoxy]methyl]-1,12,19,25-tetraoxo-16-oxa-13,20,24-t riazanonacos-1-yl]-4-hydroxy-2-pyrrolidinyl)methyl ester
actatcccaggaatttgaagt

SEQ ID NO: 136 - RNA, 23 nt, synthetic construct
  source 1..23: mol_type = other RNA
  modified_base 1: mod_base = OTHER; note = 2'-O-methyladenosine-3'-phosphorothioate
  modified_base 2: mod_base = OTHER; note = 2'-deoxy-2'-fluorocytidine-3'-phosphorothioate
  modified_base 3: mod_base = OTHER; note = 2'-O-methyluridine-3'-phosphate
  modified_base 4: mod_base = OTHER; note = 2'-O-methyluridine-3'-phosphate
  modified_base 5: mod_base = OTHER; note = 2'-O-methylcytidine-3'-phosphate
  modified_base 6: mod_base = OTHER; note = 2'-deoxy-2'-fluoroadenosine-3'-phosphate
  modified_base 7: mod_base = OTHER; note = 2'-O-methyladenosine-3'-phosphate
  modified_base 8: mod_base = OTHER; note = 2'-deoxy-2'-fluoroadenosine-3'-phosphate
  modified_base 9: mod_base = OTHER; note = 2'-deoxy-2'-fluorouridine-3'-phosphate
  modified_base 10: mod_base = OTHER; note = 2'-O-methyluridine-3'-phosphate
  modified_base 11: mod_base = OTHER; note = 2'-O-methylcytidine-3'-phosphate
  modified_base 12: mod_base = OTHER; note = 2'-O-methylcytidine-3'-phosphate
  modified_base 13: mod_base = OTHER; note = 2'-O-methyluridine-3'-phosphate
  modified_base 14: mod_base = OTHER; note = 2'-deoxy-2'-fluoroguanosine-3'-phosphate
  modified_base 15: mod_base = OTHER; note = 2'-O-methylguanosine-3'-phosphate
  modified_base 16: mod_base = OTHER; note = 2'-deoxy-2'-fluoroguanosine-3'-phosphate
  modified_base 17: mod_base = OTHER; note = 2'-O-methyladenosine-3'-phosphate
  modified_base 18: mod_base = OTHER; note = 2'-O-methyluridine-3'-phosphate
  modified_base 19: mod_base = OTHER; note = 2'-O-methyladenosine-3'-phosphate
  modified_base 20: mod_base = OTHER; note = 2'-O-methylguanosine-3'-phosphate
  modified_base 21: mod_base = OTHER; note = 2'-O-methyluridine-3'-phosphorothioate
  modified_base 22: mod_base = OTHER; note = 2'-O-methylguanosine-3'-phosphorothioate
  modified_base 23: mod_base = OTHER; note = 2'-O-methylguanosine
acttcaaattcctgggatagtgg

SEQ ID NO: 137 - RNA, 21 nt, synthetic construct
  source 1..21: mol_type = other RNA
  modified_base 1: mod_base = OTHER; note = 2'-O-methylcytidine-3'-phosphorothioate
  modified_base 2: mod_base = OTHER; note = 2'-O-methyluridine-3'-phosphorothioate
  modified_base 3: mod_base = OTHER; note = 2'-O-methyladenosine-3'-phosphate
  modified_base 4: mod_base = OTHER; note = 2'-O-methyluridine-3'-phosphate
  modified_base 5: mod_base = OTHER; note = 2'-O-methylcytidine-3'-phosphate
  modified_base 6: mod_base = OTHER; note = 2'-O-methylcytidine-3'-phosphate
  modified_base 7: mod_base = OTHER; note = 2'-deoxy-2'-fluorocytidine-3'-phosphate
  modified_base 8: mod_base = OTHER; note = 2'-O-methyladenosine-3'-phosphate
  modified_base 9: mod_base = OTHER; note = 2'-deoxy-2'-fluoroguanosine-3'-phosphate
  modified_base 10: mod_base = OTHER; note = 2'-deoxy-2'-fluoroguanosine-3'-phosphate
  modified_base 11: mod_base = OTHER; note = 2'-deoxy-2'-fluoroadenosine-3'-phosphate
  modified_base 12: mod_base = OTHER; note = 2'-O-methyladenosine-3'-phosphate
  modified_base 13: mod_base = OTHER; note = 2'-O-methyluridine-3'-phosphate
  modified_base 14: mod_base = OTHER; note = 2'-O-methyluridine-3'-phosphate
  modified_base 15: mod_base = OTHER; note = 2'-O-methyluridine-3'-phosphate
  modified_base 16: mod_base = OTHER; note = 2'-O-methylguanosine-3'-phosphate
  modified_base 17: mod_base = OTHER; note = 2'-O-methyladenosine-3'-phosphate
  modified_base 18: mod_base = OTHER; note = 2'-O-methyladenosine-3'-phosphate
  modified_base 19: mod_base = OTHER; note = 2'-O-methylguanosine-3'-phosphate
  modified_base 20: mod_base = OTHER; note = 2'-O-methylcytidine-3'-phosphate
  modified_base 21: mod_base = OTHER; note = 2'-O-methyluridine-3'-phosphate ((2S,4R)-1-[29-[[2-(acetylamino)-2-deoxy-beta-D-galactopyra nosyl]oxy]-14,14-bis[[3-[[3-[[5-[[2-(acetylamino)-2-deoxy-b eta-D-galactopyranosyl]oxy]-1-oxopentyl]amino]propyl]amino] -3-oxopropoxy]methyl]-1,12,19,25-tetraoxo-16-oxa-13,20,24-t riazanonacos-1-yl]-4-hydroxy-2-pyrrolidinyl)methyl ester
ctatcccaggaatttgaagct

SEQ ID NO: 138 - RNA, 23 nt, synthetic construct
  source 1..23: mol_type = other RNA
  modified_base 1: mod_base = OTHER; note = 2'-O-methyladenosine-3'-phosphorothioate
  modified_base 2: mod_base = OTHER; note = 2'-deoxy-2'-fluoroguanosine-3'-phosphorothioate
  modified_base 3: mod_base = OTHER; note = 2'-O-methylcytidine-3'-phosphate
  modified_base 4: mod_base = OTHER; note = 2'-O-methyluridine-3'-phosphate
  modified_base 5: mod_base = OTHER; note = 2'-O-methyluridine-3'-phosphate
  modified_base 6: mod_base = OTHER; note = 2'-deoxy-2'-fluorocytidine-3'-phosphate
  modified_base 7: mod_base = OTHER; note = 2'-O-methyladenosine-3'-phosphate
  modified_base 8: mod_base = OTHER; note = 2'-deoxy-2'-fluoroadenosine-3'-phosphate
  modified_base 9: mod_base = OTHER; note = 2'-deoxy-2'-fluoroadenosine-3'-phosphate
  modified_base 10: mod_base = OTHER; note = 2'-O-methyluridine-3'-phosphate
  modified_base 11: mod_base = OTHER; note = 2'-O-methyluridine-3'-phosphate
  modified_base 12: mod_base = OTHER; note = 2'-O-methylcytidine-3'-phosphate
  modified_base 13: mod_base = OTHER; note = 2'-O-methylcytidine-3'-phosphate
  modified_base 14: mod_base = OTHER; note = 2'-deoxy-2'-fluorouridine-3'-phosphate
  modified_base 15: mod_base = OTHER; note = 2'-O-methylguanosine-3'-phosphate
  modified_base 16: mod_base = OTHER; note = 2'-deoxy-2'-fluoroguanosine-3'-phosphate
  modified_base 17: mod_base = OTHER; note = 2'-O-methylguanosine-3'-phosphate
  modified_base 18: mod_base = OTHER; note = 2'-O-methyladenosine-3'-phosphate
  modified_base 19: mod_base = OTHER; note = 2'-O-methyluridine-3'-phosphate
  modified_base 20: mod_base = OTHER; note = 2'-O-methyladenosine-3'-phosphate
  modified_base 21: mod_base = OTHER; note = 2'-O-methylguanosine-3'-phosphorothioate
  modified_base 22: mod_base = OTHER; note = 2'-O-methyluridine-3'-phosphorothioate
  modified_base 23: mod_base = OTHER; note = 2'-O-methylguanosine
agcttcaaattcctgggatagtg

SEQ ID NO: 139 - RNA, 21 nt, synthetic construct
  source 1..21: mol_type = other RNA
  modified_base 1: mod_base = OTHER; note = 2'-O-methylguanosine-3'-phosphorothioate
  modified_base 2: mod_base = OTHER; note = 2'-O-methyluridine-3'-phosphorothioate
  modified_base 3: mod_base = OTHER; note = 2'-O-methylguanosine-3'-phosphate
  modified_base 4: mod_base = OTHER; note = 2'-O-methyladenosine-3'-phosphate
  modified_base 5: mod_base = OTHER; note = 2'-O-methyladenosine-3'-phosphate
  modified_base 6: mod_base = OTHER; note = 2'-O-methylguanosine-3'-phosphate
  modified_base 7: mod_base = OTHER; note = 2'-deoxy-2'-fluoroadenosine-3'-phosphate
  modified_base 8: mod_base = OTHER; note = 2'-O-methyladenosine-3'-phosphate
  modified_base 9: mod_base = OTHER; note = 2'-deoxy-2'-fluorocytidine-3'-phosphate
  modified_base 10: mod_base = OTHER; note = 2'-deoxy-2'-fluoroadenosine-3'-phosphate
  modified_base 11: mod_base = OTHER; note = 2'-deoxy-2'-fluorouridine-3'-phosphate
  modified_base 12: mod_base = OTHER; note = 2'-O-methylguanosine-3'-phosphate
  modified_base 13: mod_base = OTHER; note = 2'-O-methylcytidine-3'-phosphate
  modified_base 14: mod_base = OTHER; note = 2'-O-methyluridine-3'-phosphate
  modified_base 15: mod_base = OTHER; note = 2'-O-methylcytidine-3'-phosphate
  modified_base 16: mod_base = OTHER; note = 2'-O-methyladenosine-3'-phosphate
  modified_base 17: mod_base = OTHER; note = 2'-O-methyluridine-3'-phosphate
  modified_base 18: mod_base = OTHER; note = 2'-O-methyluridine-3'-phosphate
  modified_base 19: mod_base = OTHER; note = 2'-O-methylguanosine-3'-phosphate
  modified_base 20: mod_base = OTHER; note = 2'-O-methylcytidine-3'-phosphate
  modified_base 21: mod_base = OTHER; note = 2'-O-methyluridine-3'-phosphate ((2S,4R)-1-[29-[[2-(acetylamino)-2-deoxy-beta-D-galactopyra nosyl]oxy]-14,14-bis[[3-[[3-[[5-[[2-(acetylamino)-2-deoxy-b eta-D-galactopyranosyl]oxy]-1-oxopentyl]amino]propyl]amino] -3-oxopropoxy]methyl]-1,12,19,25-tetraoxo-16-oxa-13,20,24-t riazanonacos-1-yl]-4-hydroxy-2-pyrrolidinyl)methyl ester
gtgaagaacatgctcattgct

SEQ ID NO: 140 - RNA, 23 nt, synthetic construct
  source 1..23: mol_type = other RNA
  modified_base 1: mod_base = OTHER; note = 2'-O-methyladenosine-3'-phosphorothioate
  modified_base 2: mod_base = OTHER; note = 2'-deoxy-2'-fluoroguanosine-3'-phosphorothioate
  modified_base 3: mod_base = OTHER; note = 2'-O-methylcytidine-3'-phosphate
  modified_base 4: mod_base = OTHER; note = 2'-O-methyladenosine-3'-phosphate
  modified_base 5: mod_base = OTHER; note = 2'-O-methyladenosine-3'-phosphate
  modified_base 6: mod_base = OTHER; note = 2'-deoxy-2'-fluorouridine-3'-phosphate
  modified_base 7: mod_base = OTHER; note = 2'-O-methylguanosine-3'-phosphate
  modified_base 8: mod_base = OTHER; note = 2'-deoxy-2'-fluoroadenosine-3'-phosphate
  modified_base 9: mod_base = OTHER; note = 2'-deoxy-2'-fluoroguanosine-3'-phosphate
  modified_base 10: mod_base = OTHER; note = 2'-O-methylcytidine-3'-phosphate
  modified_base 11: mod_base = OTHER; note = 2'-O-methyladenosine-3'-phosphate
  modified_base 12: mod_base = OTHER; note = 2'-O-methyluridine-3'-phosphate
  modified_base 13: mod_base = OTHER; note = 2'-O-methylguanosine-3'-phosphate
  modified_base 14: mod_base = OTHER; note = 2'-deoxy-2'-fluorouridine-3'-phosphate
  modified_base 15: mod_base = OTHER; note = 2'-O-methyluridine-3'-phosphate
  modified_base 16: mod_base = OTHER; note = 2'-deoxy-2'-fluorocytidine-3'-phosphate
  modified_base 17: mod_base = OTHER; note = 2'-O-methyluridine-3'-phosphate
  modified_base 18: mod_base = OTHER; note = 2'-O-methyluridine-3'-phosphate
  modified_base 19: mod_base = OTHER; note = 2'-O-methylcytidine-3'-phosphate
  modified_base 20: mod_base = OTHER; note = 2'-O-methyladenosine-3'-phosphate
  modified_base 21: mod_base = OTHER; note = 2'-O-methylcytidine-3'-phosphorothioate
  modified_base 22: mod_base = OTHER; note = 2'-O-methylcytidine-3'-phosphorothioate
  modified_base 23: mod_base = OTHER; note = 2'-O-methylcytidine
agcaatgagcatgttcttcaccc

SEQ ID NO: 141 - RNA, 21 nt, synthetic construct
  source 1..21: mol_type = other RNA
  modified_base 1: mod_base = OTHER; note = 2'-O-methylcytidine-3'-phosphorothioate
  modified_base 2: mod_base = OTHER; note = 2'-O-methyladenosine-3'-phosphorothioate
  modified_base 3: mod_base = OTHER; note = 2'-O-methylcytidine-3'-phosphate
  modified_base 4: mod_base = OTHER; note = 2'-O-methyladenosine-3'-phosphate
  modified_base 5: mod_base = OTHER; note = 2'-O-methylguanosine-3'-phosphate
  modified_base 6: mod_base = OTHER; note = 2'-O-methyladenosine-3'-phosphate
  modified_base 7: mod_base = OTHER; note = 2'-deoxy-2'-fluoroadenosine-3'-phosphate
  modified_base 8: mod_base = OTHER; note = 2'-O-methylcytidine-3'-phosphate
  modified_base 9: mod_base = OTHER; note = 2'-deoxy-2'-fluorouridine-3'-phosphate
  modified_base 10: mod_base = OTHER; note = 2'-deoxy-2'-fluorouridine-3'-phosphate
  modified_base 11: mod_base = OTHER; note = 2'-deoxy-2'-fluorouridine-3'-phosphate
  modified_base 12: mod_base = OTHER; note = 2'-O-methylcytidine-3'-phosphate
  modified_base 13: mod_base = OTHER; note = 2'-O-methyluridine-3'-phosphate
  modified_base 14: mod_base = OTHER; note = 2'-O-methylguanosine-3'-phosphate
  modified_base 15: mod_base = OTHER; note = 2'-O-methyluridine-3'-phosphate
  modified_base 16: mod_base = OTHER; note = 2'-O-methylguanosine-3'-phosphate
  modified_base 17: mod_base = OTHER; note = 2'-O-methylcytidine-3'-phosphate
  modified_base 18: mod_base = OTHER; note = 2'-O-methylguanosine-3'-phosphate
  modified_base 19: mod_base = OTHER; note = 2'-O-methyladenosine-3'-phosphate
  modified_base 20: mod_base = OTHER; note = 2'-O-methylcytidine-3'-phosphate
  modified_base 21: mod_base = OTHER; note = 2'-O-methyluridine-3'-phosphate ((2S,4R)-1-[29-[[2-(acetylamino)-2-deoxy-beta-D-galactopyra nosyl]oxy]-14,14-bis[[3-[[3-[[5-[[2-(acetylamino)-2-deoxy-b eta-D-galactopyranosyl]oxy]-1-oxopentyl]amino]propyl]amino] -3-oxopropoxy]methyl]-1,12,19,25-tetraoxo-16-oxa-13,20,24-t riazanonacos-1-yl]-4-hydroxy-2-pyrrolidinyl)methyl ester
cacagaactttctgtgcgact

SEQ ID NO: 142 - RNA, 23 nt, synthetic construct
  source 1..23: mol_type = other RNA
  modified_base 1: mod_base = OTHER; note = 2'-O-methyladenosine-3'-phosphorothioate
  modified_base 2: mod_base = OTHER; note = 2'-deoxy-2'-fluoroguanosine-3'-phosphorothioate
  modified_base 3: mod_base = OTHER; note = 2'-O-methyluridine-3'-phosphate
  modified_base 4: mod_base = OTHER; note = 2'-O-methylcytidine-3'-phosphate
  modified_base 5: mod_base = OTHER; note = 2'-O-methylguanosine-3'-phosphate
  modified_base 6: mod_base = OTHER; note = 2'-deoxy-2'-fluorocytidine-3'-phosphate
  modified_base 7: mod_base = OTHER; note = 2'-O-methyladenosine-3'-phosphate
  modified_base 8: mod_base = OTHER; note = 2'-deoxy-2'-fluorocytidine-3'-phosphate
  modified_base 9: mod_base = OTHER; note = 2'-deoxy-2'-fluoroadenosine-3'-phosphate
  modified_base 10: mod_base = OTHER; note = 2'-O-methylguanosine-3'-phosphate
  modified_base 11: mod_base = OTHER; note = 2'-O-methyladenosine-3'-phosphate
  modified_base 12: mod_base = OTHER; note = 2'-O-methyladenosine-3'-phosphate
  modified_base 13: mod_base = OTHER; note = 2'-O-methyladenosine-3'-phosphate
  modified_base 14: mod_base = OTHER; note = 2'-deoxy-2'-fluoroguanosine-3'-phosphate
  modified_base 15: mod_base = OTHER; note = 2'-O-methyluridine-3'-phosphate
  modified_base 16: mod_base = OTHER; note = 2'-deoxy-2'-fluorouridine-3'-phosphate
  modified_base 17: mod_base = OTHER; note = 2'-O-methylcytidine-3'-phosphate
  modified_base 18: mod_base = OTHER; note = 2'-O-methyluridine-3'-phosphate
  modified_base 19: mod_base = OTHER; note = 2'-O-methylguanosine-3'-phosphate
  modified_base 20: mod_base = OTHER; note = 2'-O-methyluridine-3'-phosphate
  modified_base 21: mod_base = OTHER; note = 2'-O-methylguanosine-3'-phosphorothioate
  modified_base 22: mod_base = OTHER; note = 2'-O-methyladenosine-3'-phosphorothioate
  modified_base 23: mod_base = OTHER; note = 2'-O-methyladenosine
agtcgcacagaaagttctgtgaa

SEQ ID NO: 143 - RNA, 21 nt, synthetic construct
  source 1..21: mol_type = other RNA
  modified_base 1: mod_base = OTHER; note = 2'-O-methyluridine-3'-phosphorothioate
  modified_base 2: mod_base = OTHER; note = 2'-O-methyluridine-3'-phosphorothioate
  modified_base 3: mod_base = OTHER; note = 2'-O-methyladenosine-3'-phosphate
  modified_base 4: mod_base = OTHER; note = 2'-O-methylguanosine-3'-phosphate
  modified_base 5: mod_base = OTHER; note = 2'-O-methyladenosine-3'-phosphate
  modified_base 6: mod_base = OTHER; note = 2'-O-methyladenosine-3'-phosphate
  modified_base 7: mod_base = OTHER; note = 2'-deoxy-2'-fluoroguanosine-3'-phosphate
  modified_base 8: mod_base = OTHER; note = 2'-O-methyluridine-3'-phosphate
  modified_base 9: mod_base = OTHER; note = 2'-deoxy-2'-fluoroguanosine-3'-phosphate
  modified_base 10: mod_base = OTHER; note = 2'-deoxy-2'-fluoroadenosine-3'-phosphate
  modified_base 11: mod_base = OTHER; note = 2'-deoxy-2'-fluorocytidine-3'-phosphate
  modified_base 12: mod_base = OTHER; note = 2'-O-methyluridine-3'-phosphate
  modified_base 13: mod_base = OTHER; note = 2'-O-methyluridine-3'-phosphate
  modified_base 14: mod_base = OTHER; note = 2'-O-methyluridine-3'-phosphate
  modified_base 15: mod_base = OTHER; note = 2'-O-methylguanosine-3'-phosphate
  modified_base 16: mod_base = OTHER; note = 2'-O-methyluridine-3'-phosphate
  modified_base 17: mod_base = OTHER; note = 2'-O-methylguanosine-3'-phosphate
  modified_base 18: mod_base = OTHER; note = 2'-O-methyladenosine-3'-phosphate
  modified_base 19: mod_base = OTHER; note = 2'-O-methyladenosine-3'-phosphate
  modified_base 20: mod_base = OTHER; note = 2'-O-methylguanosine-3'-phosphate
  modified_base 21: mod_base = OTHER; note = 2'-O-methyluridine-3'-phosphate ((2S,4R)-1-[29-[[2-(acetylamino)-2-deoxy-beta-D-galactopyra nosyl]oxy]-14,14-bis[[3-[[3-[[5-[[2-(acetylamino)-2-deoxy-b eta-D-galactopyranosyl]oxy]-1-oxopentyl]amino]propyl]amino] -3-oxopropoxy]methyl]-1,12,19,25-tetraoxo-16-oxa-13,20,24-t riazanonacos-1-yl]-4-hydroxy-2-pyrrolidinyl)methyl ester
ttagaagtgactttgtgaagt

SEQ ID NO: 144 - RNA, 23 nt, synthetic construct
  source 1..23: mol_type = other RNA
  modified_base 1: mod_base = OTHER; note = 2'-O-methyladenosine-3'-phosphorothioate
  modified_base 2: mod_base = OTHER; note = 2'-deoxy-2'-fluorocytidine-3'-phosphorothioate
  modified_base 3: mod_base = OTHER; note = 2'-O-methyluridine-3'-phosphate
  modified_base 4: mod_base = OTHER; note = 2'-O-methyluridine-3'-phosphate
  modified_base 5: mod_base = OTHER; note = 2'-O-methylcytidine-3'-phosphate
  modified_base 6: mod_base = OTHER; note = 2'-deoxy-2'-fluoroadenosine-3'-phosphate
  modified_base 7: mod_base = OTHER; note = 2'-O-methylcytidine-3'-phosphate
  modified_base 8: mod_base = OTHER; note = 2'-deoxy-2'-fluoroadenosine-3'-phosphate
  modified_base 9: mod_base = OTHER; note = 2'-deoxy-2'-fluoroadenosine-3'-phosphate
  modified_base 10: mod_base = OTHER; note = 2'-O-methyladenosine-3'-phosphate
  modified_base 11: mod_base = OTHER; note = 2'-O-methylguanosine-3'-phosphate
  modified_base 12: mod_base = OTHER; note = 2'-O-methyluridine-3'-phosphate
  modified_base 13: mod_base = OTHER; note = 2'-O-methylcytidine-3'-phosphate
  modified_base 14: mod_base = OTHER; note = 2'-deoxy-2'-fluoroadenosine-3'-phosphate
  modified_base 15: mod_base = OTHER; note = 2'-O-methylcytidine-3'-phosphate
  modified_base 16: mod_base = OTHER; note = 2'-deoxy-2'-fluorouridine-3'-phosphate
  modified_base 17: mod_base = OTHER; note = 2'-O-methyluridine-3'-phosphate
  modified_base 18: mod_base = OTHER; note = 2'-O-methylcytidine-3'-phosphate
  modified_base 19: mod_base = OTHER; note = 2'-O-methyluridine-3'-phosphate
  modified_base 20: mod_base = OTHER; note = 2'-O-methyladenosine-3'-phosphate
  modified_base 21: mod_base = OTHER; note = 2'-O-methyladenosine-3'-phosphorothioate
  modified_base 22: mod_base = OTHER; note = 2'-O-methyladenosine-3'-phosphorothioate
  modified_base 23: mod_base = OTHER; note = 2'-O-methylcytidine
acttcacaaagtcacttctaaac

SEQ ID NO: 145 - RNA, 21 nt, synthetic construct
  source 1..21: mol_type = other RNA
  modified_base 1: mod_base = OTHER; note = 2'-O-methylguanosine-3'-phosphorothioate
  modified_base 2: mod_base = OTHER; note = 2'-O-methyladenosine-3'-phosphorothioate
  modified_base 3: mod_base = OTHER; note = 2'-O-methylcytidine-3'-phosphate
  modified_base 4: mod_base = OTHER; note = 2'-O-methyluridine-3'-phosphate
  modified_base 5: mod_base = OTHER; note = 2'-O-methyluridine-3'-phosphate
  modified_base 6: mod_base = OTHER; note = 2'-O-methyluridine-3'-phosphate
  modified_base 7: mod_base = OTHER; note = 2'-deoxy-2'-fluoroguanosine-3'-phosphate
  modified_base 8: mod_base = OTHER; note = 2'-O-methyluridine-3'-phosphate
  modified_base 9: mod_base = OTHER; note = 2'-deoxy-2'-fluoroguanosine-3'-phosphate
  modified_base 10: mod_base = OTHER; note = 2'-deoxy-2'-fluoroadenosine-3'-phosphate
  modified_base 11: mod_base = OTHER; note = 2'-deoxy-2'-fluoroadenosine-3'-phosphate
  modified_base 12: mod_base = OTHER; note = 2'-O-methylguanosine-3'-phosphate
  modified_base 13: mod_base = OTHER; note = 2'-O-methylguanosine-3'-phosphate
  modified_base 14: mod_base = OTHER; note = 2'-O-methyladenosine-3'-phosphate
  modified_base 15: mod_base = OTHER; note = 2'-O-methyluridine-3'-phosphate
  modified_base 16: mod_base = OTHER; note = 2'-O-methyluridine-3'-phosphate
  modified_base 17: mod_base = OTHER; note = 2'-O-methyladenosine-3'-phosphate
  modified_base 18: mod_base = OTHER; note = 2'-O-methylcytidine-3'-phosphate
  modified_base 19: mod_base = OTHER; note = 2'-O-methylcytidine-3'-phosphate
  modified_base 20: mod_base = OTHER; note = 2'-O-methylcytidine-3'-phosphate
  modified_base 21: mod_base = OTHER; note = 2'-O-methyluridine-3'-phosphate ((2S,4R)-1-[29-[[2-(acetylamino)-2-deoxy-beta-D-galactopyra nosyl]oxy]-14,14-bis[[3-[[3-[[5-[[2-(acetylamino)-2-deoxy-b eta-D-galactopyranosyl]oxy]-1-oxopentyl]amino]propyl]amino] -3-oxopropoxy]methyl]-1,12,19,25-tetraoxo-16-oxa-13,20,24-t riazanonacos-1-yl]-4-hydroxy-2-pyrrolidinyl)methyl ester
gactttgtgaaggattaccct

SEQ ID NO: 146 - RNA, 23 nt, synthetic construct
  source 1..23: mol_type = other RNA
  modified_base 1: mod_base = OTHER; note = 2'-O-methyladenosine-3'-phosphorothioate
  modified_base 2: mod_base = OTHER; note = 2'-deoxy-2'-fluoroguanosine-3'-phosphorothioate
  modified_base 3: mod_base = OTHER; note = 2'-O-methylguanosine-3'-phosphate
  modified_base 4: mod_base = OTHER; note = 2'-O-methylguanosine-3'-phosphate
  modified_base 5: mod_base = OTHER; note = 2'-O-methyluridine-3'-phosphate
  modified_base 6: mod_base = OTHER; note = 2'-deoxy-2'-fluoroadenosine-3'-phosphate
  modified_base 7: mod_base = OTHER; note = 2'-O-methyladenosine-3'-phosphate
  modified_base 8: mod_base = OTHER; note = 2'-deoxy-2'-fluorouridine-3'-phosphate
  modified_base 9: mod_base = OTHER; note = 2'-deoxy-2'-fluorocytidine-3'-phosphate
  modified_base 10: mod_base = OTHER; note = 2'-O-methylcytidine-3'-phosphate
  modified_base 11: mod_base = OTHER; note = 2'-O-methyluridine-3'-phosphate
  modified_base 12: mod_base = OTHER; note = 2'-O-methyluridine-3'-phosphate
  modified_base 13: mod_base = OTHER; note = 2'-O-methylcytidine-3'-phosphate
  modified_base 14: mod_base = OTHER; note = 2'-deoxy-2'-fluoroadenosine-3'-phosphate
  modified_base 15: mod_base = OTHER; note = 2'-O-methylcytidine-3'-phosphate
  modified_base 16: mod_base = OTHER; note = 2'-deoxy-2'-fluoroadenosine-3'-phosphate
  modified_base 17: mod_base = OTHER; note = 2'-O-methyladenosine-3'-phosphate
  modified_base 18: mod_base = OTHER; note = 2'-O-methyladenosine-3'-phosphate
  modified_base 19: mod_base = OTHER; note = 2'-O-methylguanosine-3'-phosphate
  modified_base 20: mod_base = OTHER; note = 2'-O-methyluridine-3'-phosphate
  modified_base 21: mod_base = OTHER; note = 2'-O-methylcytidine-3'-phosphorothioate
  modified_base 22: mod_base = OTHER; note = 2'-O-methyladenosine-3'-phosphorothioate
  modified_base 23: mod_base = OTHER; note = 2'-O-methylcytidine
agggtaatccttcacaaagtcac

SEQ ID NO: 147 - RNA, 21 nt, synthetic construct
  source 1..21: mol_type = other RNA
  modified_base 1: mod_base = OTHER; note = 2'-O-methyluridine-3'-phosphorothioate
  modified_base 2: mod_base = OTHER; note = 2'-O-methyluridine-3'-phosphorothioate
  modified_base 3: mod_base = OTHER; note = 2'-O-methyladenosine-3'-phosphate
  modified_base 4: mod_base = OTHER; note = 2'-O-methylcytidine-3'-phosphate
  modified_base 5: mod_base = OTHER; note = 2'-O-methyladenosine-3'-phosphate
  modified_base 6: mod_base = OTHER; note = 2'-O-methylcytidine-3'-phosphate
  modified_base 7: mod_base = OTHER; note = 2'-deoxy-2'-fluorocytidine-3'-phosphate
  modified_base 8: mod_base = OTHER; note = 2'-O-methyluridine-3'-phosphate
  modified_base 9: mod_base = OTHER; note = 2'-deoxy-2'-fluorouridine-3'-phosphate
  modified_base 10: mod_base = OTHER; note = 2'-deoxy-2'-fluoroguanosine-3'-phosphate
  modified_base 11: mod_base = OTHER; note = 2'-deoxy-2'-fluoroadenosine-3'-phosphate
  modified_base 12: mod_base = OTHER; note = 2'-O-methyladenosine-3'-phosphate
  modified_base 13: mod_base = OTHER; note = 2'-O-methylguanosine-3'-phosphate
  modified_base 14: mod_base = OTHER; note = 2'-O-methyladenosine-3'-phosphate
  modified_base 15: mod_base = OTHER; note = 2'-O-methylcytidine-3'-phosphate
  modified_base 16: mod_base = OTHER; note = 2'-O-methylguanosine-3'-phosphate
  modified_base 17: mod_base = OTHER; note = 2'-O-methyluridine-3'-phosphate
  modified_base 18: mod_base = OTHER; note = 2'-O-methyladenosine-3'-phosphate
  modified_base 19: mod_base = OTHER; note = 2'-O-methylcytidine-3'-phosphate
  modified_base 20: mod_base = OTHER; note = 2'-O-methylcytidine-3'-phosphate
  modified_base 21: mod_base = OTHER; note = 2'-O-methyluridine-3'-phosphate ((2S,4R)-1-[29-[[2-(acetylamino)-2-deoxy-beta-D-galactopyra nosyl]oxy]-14,14-bis[[3-[[3-[[5-[[2-(acetylamino)-2-deoxy-b eta-D-galactopyranosyl]oxy]-1-oxopentyl]amino]propyl]amino] -3-oxopropoxy]methyl]-1,12,19,25-tetraoxo-16-oxa-13,20,24-t riazanonacos-1-yl]-4-hydroxy-2-pyrrolidinyl)methyl ester
ttacaccttgaagacgtacct

SEQ ID NO: 148 - RNA, 23 nt, synthetic construct
  source 1..23: mol_type = other RNA
  modified_base 1: mod_base = OTHER; note = 2'-O-methyladenosine-3'-phosphorothioate
  modified_base 2: mod_base = OTHER; note = 2'-deoxy-2'-fluoroguanosine-3'-phosphorothioate
  modified_base 3: mod_base = OTHER; note = 2'-O-methylguanosine-3'-phosphate
  modified_base 4: mod_base = OTHER; note = 2'-O-methyluridine-3'-phosphate
  modified_base 5: mod_base = OTHER; note = 2'-O-methyladenosine-3'-phosphate
  modified_base 6: mod_base = OTHER; note = 2'-deoxy-2'-fluorocytidine-3'-phosphate
  modified_base 7: mod_base = OTHER; note = 2'-O-methylguanosine-3'-phosphate
  modified_base 8: mod_base = OTHER; note = 2'-deoxy-2'-fluorouridine-3'-phosphate
  modified_base 9: mod_base = OTHER; note = 2'-deoxy-2'-fluorocytidine-3'-phosphate
  modified_base 10: mod_base = OTHER; note = 2'-O-methyluridine-3'-phosphate
  modified_base 11: mod_base = OTHER; note = 2'-O-methyluridine-3'-phosphate
  modified_base 12: mod_base = OTHER; note = 2'-O-methylcytidine-3'-phosphate
  modified_base 13: mod_base = OTHER; note = 2'-O-methyladenosine-3'-phosphate
  modified_base 14: mod_base = OTHER; note = 2'-deoxy-2'-fluoroadenosine-3'-phosphate
  modified_base 15: mod_base = OTHER; note = 2'-O-methylguanosine-3'-phosphate
  modified_base 16: mod_base = OTHER; note = 2'-deoxy-2'-fluoroguanosine-3'-phosphate
  modified_base 17: mod_base = OTHER; note = 2'-O-methyluridine-3'-phosphate
  modified_base 18: mod_base = OTHER; note = 2'-O-methylguanosine-3'-phosphate
  modified_base 19: mod_base = OTHER; note = 2'-O-methyluridine-3'-phosphate
  modified_base 20: mod_base = OTHER; note = 2'-O-methyladenosine-3'-phosphate
  modified_base 21: mod_base = OTHER; note = 2'-O-methyladenosine-3'-phosphorothioate
  modified_base 22: mod_base = OTHER; note = 2'-O-methyladenosine-3'-phosphorothioate
  modified_base 23: mod_base = OTHER; note = 2'-O-methyladenosine
aggtacgtcttcaaggtgtaaaa

SEQ ID NO: 149 - RNA, 21 nt, synthetic construct
  source 1..21: mol_type = other RNA
  modified_base 1: mod_base = OTHER; note = 2'-O-methylcytidine-3'-phosphorothioate
  modified_base 2: mod_base = OTHER; note = 2'-O-methyladenosine-3'-phosphorothioate
  modified_base 3: mod_base = OTHER; note = 2'-O-methylcytidine-3'-phosphate
  modified_base 4: mod_base = OTHER; note = 2'-O-methylcytidine-3'-phosphate
  modified_base 5: mod_base = OTHER; note = 2'-O-methyluridine-3'-phosphate
  modified_base 6: mod_base = OTHER; note = 2'-O-methyluridine-3'-phosphate
  modified_base 7: mod_base = OTHER; note = 2'-deoxy-2'-fluoroguanosine-3'-phosphate
  modified_base 8: mod_base = OTHER; note = 2'-O-methyladenosine-3'-phosphate
  modified_base 9: mod_base = OTHER; note = 2'-deoxy-2'-fluoroadenosine-3'-phosphate
  modified_base 10: mod_base = OTHER; note = 2'-deoxy-2'-fluoroguanosine-3'-phosphate
  modified_base 11: mod_base = OTHER; note = 2'-deoxy-2'-fluoroadenosine-3'-phosphate
  modified_base 12: mod_base = OTHER; note = 2'-O-methylcytidine-3'-phosphate
  modified_base 13: mod_base = OTHER; note = 2'-O-methylguanosine-3'-phosphate
  modified_base 14: mod_base = OTHER; note = 2'-O-methyluridine-3'-phosphate
  modified_base 15: mod_base = OTHER; note = 2'-O-methyladenosine-3'-phosphate
  modified_base 16: mod_base = OTHER; note = 2'-O-methylcytidine-3'-phosphate
  modified_base 17: mod_base = OTHER; note = 2'-O-methylcytidine-3'-phosphate
  modified_base 18: mod_base = OTHER; note = 2'-O-methylcytidine-3'-phosphate
  modified_base 19: mod_base = OTHER; note = 2'-O-methyluridine-3'-phosphate
  modified_base 20: mod_base = OTHER; note = 2'-O-methylguanosine-3'-phosphate
  modified_base 21: mod_base = OTHER; note = 2'-O-methyluridine-3'-phosphate ((2S,4R)-1-[29-[[2-(acetylamino)-2-deoxy-beta-D-galactopyra nosyl]oxy]-14,14-bis[[3-[[3-[[5-[[2-(acetylamino)-2-deoxy-b eta-D-galactopyranosyl]oxy]-1-oxopentyl]amino]propyl]amino] -3-oxopropoxy]methyl]-1,12,19,25-tetraoxo-16-oxa-13,20,24-t riazanonacos-1-yl]-4-hydroxy-2-pyrrolidinyl)methyl ester
caccttgaagacgtaccctgt

SEQ ID NO: 150 - RNA, 23 nt, synthetic construct
  source 1..23: mol_type = other RNA
  modified_base 1: mod_base = OTHER; note = 2'-O-methyladenosine-3'-phosphorothioate
  modified_base 2: mod_base = OTHER; note = 2'-deoxy-2'-fluorocytidine-3'-phosphorothioate
  modified_base 3: mod_base = OTHER; note = 2'-O-methyladenosine-3'-phosphate
  modified_base 4: mod_base = OTHER; note = 2'-O-methylguanosine-3'-phosphate
  modified_base 5: mod_base = OTHER; note = 2'-O-methylguanosine-3'-phosphate
  modified_base 6: mod_base = OTHER; note = 2'-deoxy-2'-fluoroguanosine-3'-phosphate
  modified_base 7: mod_base = OTHER; note = 2'-O-methyluridine-3'-phosphate
  modified_base 8: mod_base = OTHER; note = 2'-deoxy-2'-fluoroadenosine-3'-phosphate
  modified_base 9: mod_base = OTHER; note = 2'-deoxy-2'-fluorocytidine-3'-phosphate
  modified_base 10: mod_base = OTHER; note = 2'-O-methylguanosine-3'-phosphate
  modified_base 11: mod_base = OTHER; note = 2'-O-methyluridine-3'-phosphate
  modified_base 12: mod_base = OTHER; note = 2'-O-methylcytidine-3'-phosphate
  modified_base 13: mod_base = OTHER; note = 2'-O-methyluridine-3'-phosphate
  modified_base 14: mod_base = OTHER; note = 2'-deoxy-2'-fluorouridine-3'-phosphate
  modified_base 15: mod_base = OTHER; note = 2'-O-methylcytidine-3'-phosphate
  modified_base 16: mod_base = OTHER; note = 2'-deoxy-2'-fluoroadenosine-3'-phosphate
  modified_base 17: mod_base = OTHER; note = 2'-O-methyladenosine-3'-phosphate
  modified_base 18: mod_base = OTHER; note = 2'-O-methylguanosine-3'-phosphate
  modified_base 19: mod_base = OTHER; note = 2'-O-methylguanosine-3'-phosphate
  modified_base 20: mod_base = OTHER; note = 2'-O-methyluridine-3'-phosphate
  modified_base 21: mod_base = OTHER; note = 2'-O-methylguanosine-3'-phosphorothioate
  modified_base 22: mod_base = OTHER; note = 2'-O-methyluridine-3'-phosphorothioate
  modified_base 23: mod_base = OTHER; note = 2'-O-methyladenosine
acagggtacgtcttcaaggtgta

SEQ ID NO: 151 - RNA, 21 nt, synthetic construct
  source 1..21: mol_type = other RNA
  modified_base 1: mod_base = OTHER; note = 2'-O-methyluridine-3'-phosphorothioate
  modified_base 2: mod_base = OTHER; note = 2'-O-methylguanosine-3'-phosphorothioate
  modified_base 3: mod_base = OTHER; note = 2'-O-methyladenosine-3'-phosphate
  modified_base 4: mod_base = OTHER; note = 2'-O-methylguanosine-3'-phosphate
  modified_base 5: mod_base = OTHER; note = 2'-O-methyladenosine-3'-phosphate
  modified_base 6: mod_base = OTHER; note = 2'-O-methyladenosine-3'-phosphate
  modified_base 7: mod_base = OTHER; note = 2'-deoxy-2'-fluorouridine-3'-phosphate
  modified_base 8: mod_base = OTHER; note = 2'-O-methylguanosine-3'-phosphate
  modified_base 9: mod_base = OTHER; note = 2'-deoxy-2'-fluoroadenosine-3'-phosphate
  modified_base 10: mod_base = OTHER; note = 2'-deoxy-2'-fluorouridine-3'-phosphate
  modified_base 11: mod_base = OTHER; note = 2'-deoxy-2'-fluorouridine-3'-phosphate
  modified_base 12: mod_base = OTHER; note = 2'-O-methylcytidine-3'-phosphate
  modified_base 13: mod_base = OTHER; note = 2'-O-methyluridine-3'-phosphate
  modified_base 14: mod_base = OTHER; note = 2'-O-methyluridine-3'-phosphate
  modified_base 15: mod_base = OTHER; note = 2'-O-methyluridine-3'-phosphate
  modified_base 16: mod_base = OTHER; note = 2'-O-methylcytidine-3'-phosphate
  modified_base 17: mod_base = OTHER; note = 2'-O-methylcytidine-3'-phosphate
  modified_base 18: mod_base = OTHER; note = 2'-O-methyluridine-3'-phosphate
  modified_base 19: mod_base = OTHER; note = 2'-O-methylguanosine-3'-phosphate
  modified_base 20: mod_base = OTHER; note = 2'-O-methylcytidine-3'-phosphate
  modified_base 21: mod_base = OTHER; note = 2'-O-methyluridine-3'-phosphate ((2S,4R)-1-[29-[[2-(acetylamino)-2-deoxy-beta-D-galactopyra nosyl]oxy]-14,14-bis[[3-[[3-[[5-[[2-(acetylamino)-2-deoxy-b eta-D-galactopyranosyl]oxy]-1-oxopentyl]amino]propyl]amino] -3-oxopropoxy]methyl]-1,12,19,25-tetraoxo-16-oxa-13,20,24-t riazanonacos-1-yl]-4-hydroxy-2-pyrrolidinyl)methyl ester
tgagaatgattctttcctgct

SEQ ID NO: 152 - RNA, 23 nt, synthetic construct
  source 1..23: mol_type = other RNA
  modified_base 1: mod_base = OTHER; note = 2'-O-methyladenosine-3'-phosphorothioate
  modified_base 2: mod_base = OTHER; note = 2'-deoxy-2'-fluoroguanosine-3'-phosphorothioate
  modified_base 3: mod_base = OTHER; note = 2'-O-methylcytidine-3'-phosphate
  modified_base 4: mod_base = OTHER; note = 2'-O-methyladenosine-3'-phosphate
  modified_base 5: mod_base = OTHER; note = 2'-O-methylguanosine-3'-phosphate
  modified_base 6: mod_base = OTHER; note = 2'-deoxy-2'-fluoroguanosine-3'-phosphate
  modified_base 7: mod_base = OTHER; note = 2'-O-methyladenosine-3'-phosphate
  modified_base 8: mod_base = OTHER; note = 2'-deoxy-2'-fluoroadenosine-3'-phosphate
  modified_base 9: mod_base = OTHER; note = 2'-deoxy-2'-fluoroadenosine-3'-phosphate
  modified_base 10: mod_base = OTHER; note = 2'-O-methylguanosine-3'-phosphate
  modified_base 11: mod_base = OTHER; note = 2'-O-methyladenosine-3'-phosphate
  modified_base 12: mod_base = OTHER; note = 2'-O-methyladenosine-3'-phosphate
  modified_base 13: mod_base = OTHER; note = 2'-O-methyluridine-3'-phosphate
  modified_base 14: mod_base = OTHER; note = 2'-deoxy-2'-fluorocytidine-3'-phosphate
  modified_base 15: mod_base = OTHER; note = 2'-O-methyladenosine-3'-phosphate
  modified_base 16: mod_base = OTHER; note = 2'-deoxy-2'-fluorouridine-3'-phosphate
  modified_base 17: mod_base = OTHER; note = 2'-O-methyluridine-3'-phosphate
  modified_base 18: mod_base = OTHER; note = 2'-O-methylcytidine-3'-phosphate
  modified_base 19: mod_base = OTHER; note = 2'-O-methyluridine-3'-phosphate
  modified_base 20: mod_base = OTHER; note = 2'-O-methylcytidine-3'-phosphate
  modified_base 21: mod_base = OTHER; note = 2'-O-methyladenosine-3'-phosphorothioate
  modified_base 22: mod_base = OTHER; note = 2'-O-methyladenosine-3'-phosphorothioate
  modified_base 23: mod_base = OTHER; note = 2'-O-methyladenosine
agcaggaaagaatcattctcaaa

SEQ ID NO: 153 - RNA, 21 nt, synthetic construct
  source 1..21: mol_type = other RNA
  modified_base 1: mod_base = OTHER; note = 2'-O-methyladenosine-3'-phosphorothioate
  modified_base 2: mod_base = OTHER; note = 2'-O-methylcytidine-3'-phosphorothioate
  modified_base 3: mod_base = OTHER; note = 2'-O-methyluridine-3'-phosphate
  modified_base 4: mod_base = OTHER; note = 2'-O-methyluridine-3'-phosphate
  modified_base 5: mod_base = OTHER; note = 2'-O-methyladenosine-3'-phosphate
  modified_base 6: mod_base = OTHER; note = 2'-O-methylcytidine-3'-phosphate
  modified_base 7: mod_base = OTHER; note = 2'-deoxy-2'-fluorouridine-3'-phosphate
  modified_base 8: mod_base = OTHER; note = 2'-O-methylguanosine-3'-phosphate
  modified_base 9: mod_base = OTHER; note = 2'-deoxy-2'-fluorocytidine-3'-phosphate
  modified_base 10: mod_base = OTHER; note = 2'-deoxy-2'-fluoroadenosine-3'-phosphate
  modified_base 11: mod_base = OTHER; note = 2'-deoxy-2'-fluorocytidine-3'-phosphate
  modified_base 12: mod_base = OTHER; note = 2'-O-methyladenosine-3'-phosphate
  modified_base 13: mod_base = OTHER; note = 2'-O-methyladenosine-3'-phosphate
  modified_base 14: mod_base = OTHER; note = 2'-O-methylcytidine-3'-phosphate
  modified_base 15: mod_base = OTHER; note = 2'-O-methyladenosine-3'-phosphate
  modified_base 16: mod_base = OTHER; note = 2'-O-methyladenosine-3'-phosphate
  modified_base 17: mod_base = OTHER; note = 2'-O-methylguanosine-3'-phosphate
  modified_base 18: mod_base = OTHER; note = 2'-O-methylguanosine-3'-phosphate
  modified_base 19: mod_base = OTHER; note = 2'-O-methyladenosine-3'-phosphate
  modified_base 20: mod_base = OTHER; note = 2'-O-methylguanosine-3'-phosphate
  modified_base 21: mod_base = OTHER; note = 2'-O-methyluridine-3'-phosphate ((2S,4R)-1-[29-[[2-(acetylamino)-2-deoxy-beta-D-galactopyra nosyl]oxy]-14,14-bis[[3-[[3-[[5-[[2-(acetylamino)-2-deoxy-b eta-D-galactopyranosyl]oxy]-1-oxopentyl]amino]propyl]amino] -3-oxopropoxy]methyl]-1,12,19,25-tetraoxo-16-oxa-13,20,24-t riazanonacos-1-yl]-4-hydroxy-2-pyrrolidinyl)methyl ester
acttactgcacaacaaggagt

SEQ ID NO: 154 - RNA, 23 nt, synthetic construct
  source 1..23: mol_type = other RNA
  modified_base 1: mod_base = OTHER; note = 2'-O-methyladenosine-3'-phosphorothioate
  modified_base 2: mod_base = OTHER; note = 2'-deoxy-2'-fluorocytidine-3'-phosphorothioate
  modified_base 3: mod_base = OTHER; note = 2'-O-methyluridine-3'-phosphate
  modified_base 4: mod_base = OTHER; note = 2'-O-methylcytidine-3'-phosphate
  modified_base 5: mod_base = OTHER; note = 2'-O-methylcytidine-3'-phosphate
  modified_base 6: mod_base = OTHER; note = 2'-deoxy-2'-fluorouridine-3'-phosphate
  modified_base 7: mod_base = OTHER; note = 2'-O-methyluridine-3'-phosphate
  modified_base 8: mod_base = OTHER; note = 2'-deoxy-2'-fluoroguanosine-3'-phosphate
  modified_base 9: mod_base = OTHER; note = 2'-deoxy-2'-fluorouridine-3'-phosphate
  modified_base 10: mod_base = OTHER; note = 2'-O-methyluridine-3'-phosphate
  modified_base 11: mod_base = OTHER; note = 2'-O-methylguanosine-3'-phosphate
  modified_base 12: mod_base = OTHER; note = 2'-O-methyluridine-3'-phosphate
  modified_base 13: mod_base = OTHER; note = 2'-O-methylguanosine-3'-phosphate
  modified_base 14: mod_base = OTHER; note = 2'-deoxy-2'-fluorocytidine-3'-phosphate
  modified_base 15: mod_base = OTHER; note = 2'-O-methyladenosine-3'-phosphate
  modified_base 16: mod_base = OTHER; note = 2'-deoxy-2'-fluoroguanosine-3'-phosphate
  modified_base 17: mod_base = OTHER; note = 2'-O-methyluridine-3'-phosphate
  modified_base 18: mod_base = OTHER; note = 2'-O-methyladenosine-3'-phosphate
  modified_base 19: mod_base = OTHER; note = 2'-O-methyladenosine-3'-phosphate
  modified_base 20: mod_base = OTHER; note = 2'-O-methylguanosine-3'-phosphate
  modified_base 21: mod_base = OTHER; note = 2'-O-methyluridine-3'-phosphorothioate
  modified_base 22: mod_base = OTHER; note = 2'-O-methylguanosine-3'-phosphorothioate
  modified_base 23: mod_base = OTHER; note = 2'-O-methylguanosine
actccttgttgtgcagtaagtgg

SEQ ID NO: 155 - RNA, 21 nt, synthetic construct
  source 1..21: mol_type = other RNA
  modified_base 1: mod_base = OTHER; note = 2'-O-methyluridine-3'-phosphorothioate
  modified_base 2: mod_base = OTHER; note = 2'-O-methylcytidine-3'-phosphorothioate
  modified_base 3: mod_base = OTHER; note = 2'-O-methyluridine-3'-phosphate
  modified_base 4: mod_base = OTHER; note = 2'-O-methylcytidine-3'-phosphate
  modified_base 5: mod_base = OTHER; note = 2'-O-methyluridine-3'-phosphate
  modified_base 6: mod_base = OTHER; note = 2'-O-methylguanosine-3'-phosphate
  modified_base 7: mod_base = OTHER; note = 2'-deoxy-2'-fluorocytidine-3'-phosphate
  modified_base 8: mod_base = OTHER; note = 2'-O-methylcytidine-3'-phosphate
  modified_base 9: mod_base = OTHER; note = 2'-deoxy-2'-fluorocytidine-3'-phosphate
  modified_base 10: mod_base = OTHER; note = 2'-deoxy-2'-fluoroadenosine-3'-phosphate
  modified_base 11: mod_base = OTHER; note = 2'-deoxy-2'-fluorocytidine-3'-phosphate
  modified_base 12: mod_base = OTHER; note = 2'-O-methyluridine-3'-phosphate
  modified_base 13: mod_base = OTHER; note = 2'-O-methylguanosine-3'-phosphate
  modified_base 14: mod_base = OTHER; note = 2'-O-methyluridine-3'-phosphate
  modified_base 15: mod_base = OTHER; note = 2'-O-methyladenosine-3'-phosphate
  modified_base 16: mod_base = OTHER; note = 2'-O-methyluridine-3'-phosphate
  modified_base 17: mod_base = OTHER; note = 2'-O-methyluridine-3'-phosphate
  modified_base 18: mod_base = OTHER; note = 2'-O-methylcytidine-3'-phosphate
  modified_base 19: mod_base = OTHER; note = 2'-O-methyluridine-3'-phosphate
  modified_base 20: mod_base = OTHER; note = 2'-O-methyluridine-3'-phosphate
  modified_base 21: mod_base = OTHER; note = 2'-O-methyluridine-3'-phosphate ((2S,4R)-1-[29-[[2-(acetylamino)-2-deoxy-beta-D-galactopyra nosyl]oxy]-14,14-bis[[3-[[3-[[5-[[2-(acetylamino)-2-deoxy-b eta-D-galactopyranosyl]oxy]-1-oxopentyl]amino]propyl]amino] -3-oxopropoxy]methyl]-1,12,19,25-tetraoxo-16-oxa-13,20,24-t riazanonacos-1-yl]-4-hydroxy-2-pyrrolidinyl)methyl ester
tctctgcccactgtattcttt

SEQ ID NO: 156 - RNA, 23 nt, synthetic construct
  source 1..23: mol_type = other RNA
  modified_base 1: mod_base = OTHER; note = 2'-O-methyladenosine-3'-phosphorothioate
  modified_base 2: mod_base = OTHER; note = 2'-deoxy-2'-fluoroadenosine-3'-phosphorothioate
  modified_base 3: mod_base = OTHER; note = 2'-O-methyladenosine-3'-phosphate
  modified_base 4: mod_base = OTHER; note = 2'-O-methylguanosine-3'-phosphate
  modified_base 5: mod_base = OTHER; note = 2'-O-methyladenosine-3'-phosphate
  modified_base 6: mod_base = OTHER; note = 2'-deoxy-2'-fluoroadenosine-3'-phosphate
  modified_base 7: mod_base = OTHER; note = 2'-O-methyluridine-3'-phosphate
  modified_base 8: mod_base = OTHER; note = 2'-deoxy-2'-fluoroadenosine-3'-phosphate
  modified_base 9: mod_base = OTHER; note = 2'-deoxy-2'-fluorocytidine-3'-phosphate
  modified_base 10: mod_base = OTHER; note = 2'-O-methyladenosine-3'-phosphate
  modified_base 11: mod_base = OTHER; note = 2'-O-methylguanosine-3'-phosphate
  modified_base 12: mod_base = OTHER; note = 2'-O-methyluridine-3'-phosphate
  modified_base 13: mod_base = OTHER; note = 2'-O-methylguanosine-3'-phosphate
  modified_base 14: mod_base = OTHER; note = 2'-deoxy-2'-fluoroguanosine-3'-phosphate
  modified_base 15: mod_base = OTHER; note = 2'-O-methylguanosine-3'-phosphate
  modified_base 16: mod_base = OTHER; note = 2'-deoxy-2'-fluorocytidine-3'-phosphate
  modified_base 17: mod_base = OTHER; note = 2'-O-methyladenosine-3'-phosphate
  modified_base 18: mod_base = OTHER; note = 2'-O-methylguanosine-3'-phosphate
  modified_base 19: mod_base = OTHER; note = 2'-O-methyladenosine-3'-phosphate
  modified_base 20: mod_base = OTHER; note = 2'-O-methylguanosine-3'-phosphate
  modified_base 21: mod_base = OTHER; note = 2'-O-methyladenosine-3'-phosphorothioate
  modified_base 22: mod_base = OTHER; note = 2'-O-methylcytidine-3'-phosphorothioate
  modified_base 23: mod_base = OTHER; note = 2'-O-methyladenosine
aaagaatacagtgggcagagaca

SEQ ID NO: 157 - RNA, 21 nt, synthetic construct
  source 1..21: mol_type = other RNA
  modified_base 1: mod_base = OTHER; note = 2'-O-methyluridine-3'-phosphorothioate
  modified_base 2: mod_base = OTHER; note = 2'-O-methyluridine-3'-phosphorothioate
  modified_base 3: mod_base = OTHER; note = 2'-O-methylcytidine-3'-phosphate
  modified_base 4: mod_base = OTHER; note = 2'-O-methyladenosine-3'-phosphate
  modified_base 5: mod_base = OTHER; note = 2'-O-methylcytidine-3'-phosphate
  modified_base 6: mod_base = OTHER; note = 2'-O-methyladenosine-3'-phosphate
  modified_base 7: mod_base = OTHER; note = 2'-deoxy-2'-fluoroguanosine-3'-phosphate
  modified_base 8: mod_base = OTHER; note = 2'-O-methyladenosine-3'-phosphate
  modified_base 9: mod_base = OTHER; note = 2'-deoxy-2'-fluoroadenosine-3'-phosphate
  modified_base 10: mod_base = OTHER; note = 2'-deoxy-2'-fluorocytidine-3'-phosphate
  modified_base 11: mod_base = OTHER; note = 2'-deoxy-2'-fluorouridine-3'-phosphate
  modified_base 12: mod_base = OTHER; note = 2'-O-methyluridine-3'-phosphate
  modified_base 13: mod_base = OTHER; note = 2'-O-methyluridine-3'-phosphate
  modified_base 14: mod_base = OTHER; note = 2'-O-methylcytidine-3'-phosphate
  modified_base 15: mod_base = OTHER; note = 2'-O-methyluridine-3'-phosphate
  modified_base 16: mod_base = OTHER; note = 2'-O-methylguanosine-3'-phosphate
  modified_base 17: mod_base = OTHER; note = 2'-O-methyluridine-3'-phosphate
  modified_base 18: mod_base = OTHER; note = 2'-O-methylguanosine-3'-phosphate
  modified_base 19: mod_base = OTHER; note = 2'-O-methylcytidine-3'-phosphate
  modified_base 20: mod_base = OTHER; note = 2'-O-methylguanosine-3'-phosphate
  modified_base 21: mod_base = OTHER; note = 2'-O-methyluridine-3'-phosphate ((2S,4R)-1-[29-[[2-(acetylamino)-2-deoxy-beta-D-galactopyra nosyl]oxy]-14,14-bis[[3-[[3-[[5-[[2-(acetylamino)-2-deoxy-b eta-D-galactopyranosyl]oxy]-1-oxopentyl]amino]propyl]amino] -3-oxopropoxy]methyl]-1,12,19,25-tetraoxo-16-oxa-13,20,24-t riazanonacos-1-yl]-4-hydroxy-2-pyrrolidinyl)methyl ester
ttcacagaactttctgtgcgt

SEQ ID NO: 158 - RNA, 23 nt, synthetic construct
  source 1..23: mol_type = other RNA
  modified_base 1: mod_base = OTHER; note = 2'-O-methyladenosine-3'-phosphorothioate
  modified_base 2: mod_base = OTHER; note = 2'-deoxy-2'-fluorocytidine-3'-phosphorothioate
  modified_base 3: mod_base = OTHER; note = 2'-O-methylguanosine-3'-phosphate
  modified_base 4: mod_base = OTHER; note = 2'-O-methylcytidine-3'-phosphate
  modified_base 5: mod_base = OTHER; note = 2'-O-methyladenosine-3'-phosphate
  modified_base 6: mod_base = OTHER; note = 2'-deoxy-2'-fluorocytidine-3'-phosphate
  modified_base 7: mod_base = OTHER; note = 2'-O-methyladenosine-3'-phosphate
  modified_base 8: mod_base = OTHER; note = 2'-deoxy-2'-fluoroguanosine-3'-phosphate
  modified_base 9: mod_base = OTHER; note = 2'-deoxy-2'-fluoroadenosine-3'-phosphate
  modified_base 10: mod_base = OTHER; note = 2'-O-methyladenosine-3'-phosphate
  modified_base 11: mod_base = OTHER; note = 2'-O-methyladenosine-3'-phosphate
  modified_base 12: mod_base = OTHER; note = 2'-O-methylguanosine-3'-phosphate
  modified_base 13: mod_base = OTHER; note = 2'-O-methyluridine-3'-phosphate
  modified_base 14: mod_base = OTHER; note = 2'-deoxy-2'-fluorouridine-3'-phosphate
  modified_base 15: mod_base = OTHER; note = 2'-O-methylcytidine-3'-phosphate
  modified_base 16: mod_base = OTHER; note = 2'-deoxy-2'-fluorouridine-3'-phosphate
  modified_base 17: mod_base = OTHER; note = 2'-O-methylguanosine-3'-phosphate
  modified_base 18: mod_base = OTHER; note = 2'-O-methyluridine-3'-phosphate
  modified_base 19: mod_base = OTHER; note = 2'-O-methylguanosine-3'-phosphate
  modified_base 20: mod_base = OTHER; note = 2'-O-methyladenosine-3'-phosphate
  modified_base 21: mod_base = OTHER; note = 2'-O-methyladenosine-3'-phosphorothioate
  modified_base 22: mod_base = OTHER; note = 2'-O-methyladenosine-3'-phosphorothioate
  modified_base 23: mod_base = OTHER; note = 2'-O-methyladenosine
acgcacagaaagttctgtgaaaa

SEQ ID NO: 159 - RNA, 21 nt, synthetic construct
  source 1..21: mol_type = other RNA
  modified_base 1: mod_base = OTHER; note = 2'-O-methyluridine-3'-phosphorothioate
  modified_base 2: mod_base = OTHER; note = 2'-O-methyluridine-3'-phosphorothioate
  modified_base 3: mod_base = OTHER; note = 2'-O-methylguanosine-3'-phosphate
  modified_base 4: mod_base = OTHER; note = 2'-O-methyladenosine-3'-phosphate
  modified_base 5: mod_base = OTHER; note = 2'-O-methylguanosine-3'-phosphate
  modified_base 6: mod_base = OTHER; note = 2'-O-methylcytidine-3'-phosphate
  modified_base 7: mod_base = OTHER; note = 2'-deoxy-2'-fluorouridine-3'-phosphate
  modified_base 8: mod_base = OTHER; note = 2'-O-methylcytidine-3'-phosphate
  modified_base 9: mod_base = OTHER; note = 2'-deoxy-2'-fluorouridine-3'-phosphate
  modified_base 10: mod_base = OTHER; note = 2'-deoxy-2'-fluoroguanosine-3'-phosphate
  modified_base 11: mod_base = OTHER; note = 2'-deoxy-2'-fluorocytidine-3'-phosphate
  modified_base 12: mod_base = OTHER; note = 2'-O-methyladenosine-3'-phosphate
  modified_base 13: mod_base = OTHER; note = 2'-O-methyluridine-3'-phosphate
  modified_base 14: mod_base = OTHER; note = 2'-O-methylcytidine-3'-phosphate
  modified_base 15: mod_base = OTHER; note = 2'-O-methyluridine-3'-phosphate
  modified_base 16: mod_base = OTHER; note = 2'-O-methylguanosine-3'-phosphate
  modified_base 17: mod_base = OTHER; note = 2'-O-methyluridine-3'-phosphate
  modified_base 18: mod_base = OTHER; note = 2'-O-methylcytidine-3'-phosphate
  modified_base 19: mod_base = OTHER; note = 2'-O-methyluridine-3'-phosphate
  modified_base 20: mod_base = OTHER; note = 2'-O-methylguanosine-3'-phosphate
  modified_base 21: mod_base = OTHER; note = 2'-O-methyluridine-3'-phosphate ((2S,4R)-1-[29-[[2-(acetylamino)-2-deoxy-beta-D-galactopyra nosyl]oxy]-14,14-bis[[3-[[3-[[5-[[2-(acetylamino)-2-deoxy-b eta-D-galactopyranosyl]oxy]-1-oxopentyl]amino]propyl]amino] -3-oxopropoxy]methyl]-1,12,19,25-tetraoxo-16-oxa-13,20,24-t riazanonacos-1-yl]-4-hydroxy-2-pyrrolidinyl)methyl ester
ttgagctctgcatctgtctgt

SEQ ID NO: 160 - RNA, 23 nt, synthetic construct
  source 1..23: mol_type = other RNA
  modified_base 1: mod_base = OTHER; note = 2'-O-methyladenosine-3'-phosphorothioate
  modified_base 2: mod_base = OTHER; note = 2'-deoxy-2'-fluorocytidine-3'-phosphorothioate
  modified_base 3: mod_base = OTHER; note = 2'-O-methyladenosine-3'-phosphate
  modified_base 4: mod_base = OTHER; note = 2'-O-methylguanosine-3'-phosphate
  modified_base 5: mod_base = OTHER; note = 2'-O-methyladenosine-3'-phosphate
  modified_base 6: mod_base = OTHER; note = 2'-deoxy-2'-fluorocytidine-3'-phosphate
  modified_base 7: mod_base = OTHER; note = 2'-O-methyladenosine-3'-phosphate
  modified_base 8: mod_base = OTHER; note = 2'-deoxy-2'-fluoroguanosine-3'-phosphate
  modified_base 9: mod_base = OTHER; note = 2'-deoxy-2'-fluoroadenosine-3'-phosphate
  modified_base 10: mod_base = OTHER; note = 2'-O-methyluridine-3'-phosphate
  modified_base 11: mod_base = OTHER; note = 2'-O-methylguanosine-3'-phosphate
  modified_base 12: mod_base = OTHER; note = 2'-O-methylcytidine-3'-phosphate
  modified_base 13: mod_base = OTHER; note = 2'-O-methyladenosine-3'-phosphate
  modified_base 14: mod_base = OTHER; note = 2'-deoxy-2'-fluoroguanosine-3'-phosphate
  modified_base 15: mod_base = OTHER; note = 2'-O-methyladenosine-3'-phosphate
  modified_base 16: mod_base = OTHER; note = 2'-deoxy-2'-fluoroguanosine-3'-phosphate
  modified_base 17: mod_base = OTHER; note = 2'-O-methylcytidine-3'-phosphate
  modified_base 18: mod_base = OTHER; note = 2'-O-methyluridine-3'-phosphate
  modified_base 19: mod_base = OTHER; note = 2'-O-methylcytidine-3'-phosphate
  modified_base 20: mod_base = OTHER; note = 2'-O-methyladenosine-3'-phosphate
  modified_base 21: mod_base = OTHER; note = 2'-O-methyladenosine-3'-phosphorothioate
  modified_base 22: mod_base = OTHER; note = 2'-O-methyluridine-3'-phosphorothioate
  modified_base 23: mod_base = OTHER; note = 2'-O-methyladenosine
acagacagatgcagagctcaata

SEQ ID NO: 161 - RNA, 21 nt, synthetic construct
  source 1..21: mol_type = other RNA
  modified_base 1: mod_base = OTHER; note = 2'-O-methyluridine-3'-phosphorothioate
  modified_base 2: mod_base = OTHER; note = 2'-O-methyladenosine-3'-phosphorothioate
  modified_base 3: mod_base = OTHER; note = 2'-O-methylguanosine-3'-phosphate
  modified_base 4: mod_base = OTHER; note = 2'-O-methyladenosine-3'-phosphate
  modified_base 5: mod_base = OTHER; note = 2'-O-methyladenosine-3'-phosphate
  modified_base 6: mod_base = OTHER; note = 2'-O-methylguanosine-3'-phosphate
  modified_base 7: mod_base = OTHER; note = 2'-deoxy-2'-fluorouridine-3'-phosphate
  modified_base 8: mod_base = OTHER; note = 2'-O-methylguanosine-3'-phosphate
  modified_base 9: mod_base = OTHER; note = 2'-deoxy-2'-fluoroadenosine-3'-phosphate
  modified_base 10: mod_base = OTHER; note = 2'-deoxy-2'-fluorocytidine-3'-phosphate
  modified_base 11: mod_base = OTHER; note = 2'-deoxy-2'-fluorouridine-3'-phosphate
  modified_base 12: mod_base = OTHER; note = 2'-O-methyluridine-3'-phosphate
  modified_base 13: mod_base = OTHER; note = 2'-O-methyluridine-3'-phosphate
  modified_base 14: mod_base = OTHER; note = 2'-O-methylguanosine-3'-phosphate
  modified_base 15: mod_base = OTHER; note = 2'-O-methyluridine-3'-phosphate
  modified_base 16: mod_base = OTHER; note = 2'-O-methylguanosine-3'-phosphate
  modified_base 17: mod_base = OTHER; note = 2'-O-methyladenosine-3'-phosphate
  modified_base 18: mod_base = OTHER; note = 2'-O-methyladenosine-3'-phosphate
  modified_base 19: mod_base = OTHER; note = 2'-O-methylguanosine-3'-phosphate
  modified_base 20: mod_base = OTHER; note = 2'-O-methylguanosine-3'-phosphate
  modified_base 21: mod_base = OTHER; note = 2'-O-methyluridine-3'-phosphate ((2S,4R)-1-[29-[[2-(acetylamino)-2-deoxy-beta-D-galactopyra nosyl]oxy]-14,14-bis[[3-[[3-[[5-[[2-(acetylamino)-2-deoxy-b eta-D-galactopyranosyl]oxy]-1-oxopentyl]amino]propyl]amino] -3-oxopropoxy]methyl]-1,12,19,25-tetraoxo-16-oxa-13,20,24-t riazanonacos-1-yl]-4-hydroxy-2-pyrrolidinyl)methyl ester
tagaagtgactttgtgaaggt

SEQ ID NO: 162 - RNA, 23 nt, synthetic construct
  source 1..23: mol_type = other RNA
  modified_base 1: mod_base = OTHER; note = 2'-O-methyladenosine-3'-phosphorothioate
  modified_base 2: mod_base = OTHER; note = 2'-deoxy-2'-fluorocytidine-3'-phosphorothioate
  modified_base 3: mod_base = OTHER; note = 2'-O-methylcytidine-3'-phosphate
  modified_base 4: mod_base = OTHER; note = 2'-O-methyluridine-3'-phosphate
  modified_base 5: mod_base = OTHER; note = 2'-O-methyluridine-3'-phosphate
  modified_base 6: mod_base = OTHER; note = 2'-deoxy-2'-fluorocytidine-3'-phosphate
  modified_base 7: mod_base = OTHER; note = 2'-O-methyladenosine-3'-phosphate
  modified_base 8: mod_base = OTHER; note = 2'-deoxy-2'-fluorocytidine-3'-phosphate
  modified_base 9: mod_base = OTHER; note = 2'-deoxy-2'-fluoroadenosine-3'-phosphate
  modified_base 10: mod_base = OTHER; note = 2'-O-methyladenosine-3'-phosphate
  modified_base 11: mod_base = OTHER; note = 2'-O-methyladenosine-3'-phosphate
  modified_base 12: mod_base = OTHER; note = 2'-O-methylguanosine-3'-phosphate
  modified_base 13: mod_base = OTHER; note = 2'-O-methyluridine-3'-phosphate
  modified_base 14: mod_base = OTHER; note = 2'-deoxy-2'-fluorocytidine-3'-phosphate
  modified_base 15: mod_base = OTHER; note = 2'-O-methyladenosine-3'-phosphate
  modified_base 16: mod_base = OTHER; note = 2'-deoxy-2'-fluorocytidine-3'-phosphate
  modified_base 17: mod_base = OTHER; note = 2'-O-methyluridine-3'-phosphate
  modified_base 18: mod_base = OTHER; note = 2'-O-methyluridine-3'-phosphate
  modified_base 19: mod_base = OTHER; note = 2'-O-methylcytidine-3'-phosphate
  modified_base 20: mod_base = OTHER; note = 2'-O-methyluridine-3'-phosphate
  modified_base 21: mod_base = OTHER; note = 2'-O-methyladenosine-3'-phosphorothioate
  modified_base 22: mod_base = OTHER; note = 2'-O-methyladenosine-3'-phosphorothioate
  modified_base 23: mod_base = OTHER; note = 2'-O-methyladenosine
accttcacaaagtcacttctaaa

SEQ ID NO: 163 - RNA, 21 nt, synthetic construct
  source 1..21: mol_type = other RNA
  modified_base 1: mod_base = OTHER; note = 2'-O-methylguanosine-3'-phosphorothioate
  modified_base 2: mod_base = OTHER; note = 2'-O-methylcytidine-3'-phosphorothioate
  modified_base 3: mod_base = OTHER; note = 2'-O-methyladenosine-3'-phosphate
  modified_base 4: mod_base = OTHER; note = 2'-O-methylcytidine-3'-phosphate
  modified_base 5: mod_base = OTHER; note = 2'-O-methyladenosine-3'-phosphate
  modified_base 6: mod_base = OTHER; note = 2'-O-methyladenosine-3'-phosphate
  modified_base 7: mod_base = OTHER; note = 2'-deoxy-2'-fluorocytidine-3'-phosphate
  modified_base 8: mod_base = OTHER; note = 2'-O-methyladenosine-3'-phosphate
  modified_base 9: mod_base = OTHER; note = 2'-deoxy-2'-fluoroadenosine-3'-phosphate
  modified_base 10: mod_base = OTHER; note = 2'-deoxy-2'-fluoroguanosine-3'-phosphate
  modified_base 11: mod_base = OTHER; note = 2'-deoxy-2'-fluoroguanosine-3'-phosphate
  modified_base 12: mod_base = OTHER; note = 2'-O-methyladenosine-3'-phosphate
  modified_base 13: mod_base = OTHER; note = 2'-O-methylguanosine-3'-phosphate
  modified_base 14: mod_base = OTHER; note = 2'-O-methylcytidine-3'-phosphate
  modified_base 15: mod_base = OTHER; note = 2'-O-methyluridine-3'-phosphate
  modified_base 16: mod_base = OTHER; note = 2'-O-methylcytidine-3'-phosphate
  modified_base 17: mod_base = OTHER; note = 2'-O-methyladenosine-3'-phosphate
  modified_base 18: mod_base = OTHER; note = 2'-O-methyluridine-3'-phosphate
  modified_base 19: mod_base = OTHER; note = 2'-O-methylguanosine-3'-phosphate
  modified_base 20: mod_base = OTHER; note = 2'-O-methylguanosine-3'-phosphate
  modified_base 21: mod_base = OTHER; note = 2'-O-methyluridine-3'-phosphate ((2S,4R)-1-[29-[[2-(acetylamino)-2-deoxy-beta-D-galactopyra nosyl]oxy]-14,14-bis[[3-[[3-[[5-[[2-(acetylamino)-2-deoxy-b eta-D-galactopyranosyl]oxy]-1-oxopentyl]amino]propyl]amino] -3-oxopropoxy]methyl]-1,12,19,25-tetraoxo-16-oxa-13,20,24-t riazanonacos-1-yl]-4-hydroxy-2-pyrrolidinyl)methyl ester
gcacaacaaggagctcatggt

SEQ ID NO: 164 - RNA, 23 nt, synthetic construct
  source 1..23: mol_type = other RNA
  modified_base 1: mod_base = OTHER; note = 2'-O-methyladenosine-3'-phosphorothioate
  modified_base 2: mod_base = OTHER; note = 2'-deoxy-2'-fluorocytidine-3'-phosphorothioate
  modified_base 3: mod_base = OTHER; note = 2'-O-methylcytidine-3'-phosphate
  modified_base 4: mod_base = OTHER; note = 2'-O-methyladenosine-3'-phosphate
  modified_base 5: mod_base = OTHER; note = 2'-O-methyluridine-3'-phosphate
  modified_base 6: mod_base = OTHER; note = 2'-deoxy-2'-fluoroguanosine-3'-phosphate
  modified_base 7: mod_base = OTHER; note = 2'-O-methyladenosine-3'-phosphate
  modified_base 8: mod_base = OTHER; note = 2'-deoxy-2'-fluoroguanosine-3'-phosphate
  modified_base 9: mod_base = OTHER; note = 2'-deoxy-2'-fluorocytidine-3'-phosphate
  modified_base 10: mod_base = OTHER; note = 2'-O-methyluridine-3'-phosphate
  modified_base 11: mod_base = OTHER; note = 2'-O-methylcytidine-3'-phosphate
  modified_base 12: mod_base = OTHER; note = 2'-O-methylcytidine-3'-phosphate
  modified_base 13: mod_base = OTHER; note = 2'-O-methyluridine-3'-phosphate
  modified_base 14: mod_base = OTHER; note = 2'-deoxy-2'-fluorouridine-3'-phosphate
  modified_base 15: mod_base = OTHER; note = 2'-O-methylguanosine-3'-phosphate
  modified_base 16: mod_base = OTHER; note = 2'-deoxy-2'-fluorouridine-3'-phosphate
  modified_base 17: mod_base = OTHER; note = 2'-O-methyluridine-3'-phosphate
  modified_base 18: mod_base = OTHER; note = 2'-O-methylguanosine-3'-phosphate
  modified_base 19: mod_base = OTHER; note = 2'-O-methyluridine-3'-phosphate
  modified_base 20: mod_base = OTHER; note = 2'-O-methylguanosine-3'-phosphate
  modified_base 21: mod_base = OTHER; note = 2'-O-methylcytidine-3'-phosphorothioate
  modified_base 22: mod_base = OTHER; note = 2'-O-methyladenosine-3'-phosphorothioate
  modified_base 23: mod_base = OTHER; note = 2'-O-methylguanosine
accatgagctccttgttgtgcag

SEQ ID NO: 165 - RNA, 21 nt, synthetic construct
  source 1..21: mol_type = other RNA
  modified_base 1: mod_base = OTHER; note = 2'-O-methyluridine-3'-phosphorothioate
  modified_base 2: mod_base = OTHER; note = 2'-O-methylguanosine-3'-phosphorothioate
  modified_base 3: mod_base = OTHER; note = 2'-O-methyladenosine-3'-phosphate
  modified_base 4: mod_base = OTHER; note = 2'-O-methylguanosine-3'-phosphate
  modified_base 5: mod_base = OTHER; note = 2'-O-methylcytidine-3'-phosphate
  modified_base 6: mod_base = OTHER; note = 2'-O-methyluridine-3'-phosphate
  modified_base 7: mod_base = OTHER; note = 2'-deoxy-2'-fluorocytidine-3'-phosphate
  modified_base 8: mod_base = OTHER; note = 2'-O-methyluridine-3'-phosphate
  modified_base 9: mod_base = OTHER; note = 2'-deoxy-2'-fluoroguanosine-3'-phosphate
  modified_base 10: mod_base = OTHER; note = 2'-deoxy-2'-fluorocytidine-3'-phosphate
  modified_base 11: mod_base = OTHER; note = 2'-deoxy-2'-fluoroadenosine-3'-phosphate
  modified_base 12: mod_base = OTHER; note = 2'-O-methyluridine-3'-phosphate
  modified_base 13: mod_base = OTHER; note = 2'-O-methylcytidine-3'-phosphate
  modified_base 14: mod_base = OTHER; note = 2'-O-methyluridine-3'-phosphate
  modified_base 15: mod_base = OTHER; note = 2'-O-methylguanosine-3'-phosphate
  modified_base 16: mod_base = OTHER; note = 2'-O-methyluridine-3'-phosphate
  modified_base 17: mod_base = OTHER; note = 2'-O-methylcytidine-3'-phosphate
  modified_base 18: mod_base = OTHER; note = 2'-O-methyluridine-3'-phosphate
  modified_base 19: mod_base = OTHER; note = 2'-O-methylguanosine-3'-phosphate
  modified_base 20: mod_base = OTHER; note = 2'-O-methylguanosine-3'-phosphate
  modified_base 21: mod_base = OTHER; note = 2'-O-methyluridine-3'-phosphate ((2S,4R)-1-[29-[[2-(acetylamino)-2-deoxy-beta-D-galactopyra nosyl]oxy]-14,14-bis[[3-[[3-[[5-[[2-(acetylamino)-2-deoxy-b eta-D-galactopyranosyl]oxy]-1-oxopentyl]amino]propyl]amino] -3-oxopropoxy]methyl]-1,12,19,25-tetraoxo-16-oxa-13,20,24-t riazanonacos-1-yl]-4-hydroxy-2-pyrrolidinyl)methyl ester
tgagctctgcatctgtctggt

SEQ ID NO: 166 - RNA, 23 nt, synthetic construct
  source 1..23: mol_type = other RNA
  modified_base 1: mod_base = OTHER; note = 2'-O-methyladenosine-3'-phosphorothioate
  modified_base 2: mod_base = OTHER; note = 2'-deoxy-2'-fluorocytidine-3'-phosphorothioate
  modified_base 3: mod_base = OTHER; note = 2'-O-methylcytidine-3'-phosphate
  modified_base 4: mod_base = OTHER; note = 2'-O-methyladenosine-3'-phosphate
  modified_base 5: mod_base = OTHER; note = 2'-O-methylguanosine-3'-phosphate
  modified_base 6: mod_base = OTHER; note = 2'-deoxy-2'-fluoroadenosine-3'-phosphate
  modified_base 7: mod_base = OTHER; note = 2'-O-methylcytidine-3'-phosphate
  modified_base 8: mod_base = OTHER; note = 2'-deoxy-2'-fluoroadenosine-3'-phosphate
  modified_base 9: mod_base = OTHER; note = 2'-deoxy-2'-fluoroguanosine-3'-phosphate
  modified_base 10: mod_base = OTHER; note = 2'-O-methyladenosine-3'-phosphate
  modified_base 11: mod_base = OTHER; note = 2'-O-methyluridine-3'-phosphate
  modified_base 12: mod_base = OTHER; note = 2'-O-methylguanosine-3'-phosphate
  modified_base 13: mod_base = OTHER; note = 2'-O-methylcytidine-3'-phosphate
  modified_base 14: mod_base = OTHER; note = 2'-deoxy-2'-fluoroadenosine-3'-phosphate
  modified_base 15: mod_base = OTHER; note = 2'-O-methylguanosine-3'-phosphate
  modified_base 16: mod_base = OTHER; note = 2'-deoxy-2'-fluoroadenosine-3'-phosphate
  modified_base 17: mod_base = OTHER; note = 2'-O-methylguanosine-3'-phosphate
  modified_base 18: mod_base = OTHER; note = 2'-O-methylcytidine-3'-phosphate
  modified_base 19: mod_base = OTHER; note = 2'-O-methyluridine-3'-phosphate
  modified_base 20: mod_base = OTHER; note = 2'-O-methylcytidine-3'-phosphate
  modified_base 21: mod_base = OTHER; note = 2'-O-methyladenosine-3'-phosphorothioate
  modified_base 22: mod_base = OTHER; note = 2'-O-methyladenosine-3'-phosphorothioate
  modified_base 23: mod_base = OTHER; note = 2'-O-methyluridine
accagacagatgcagagctcaat

SEQ ID NO: 167 - RNA, 21 nt, synthetic construct
  source 1..21: mol_type = other RNA
  modified_base 1: mod_base = OTHER; note = 2'-O-methylguanosine-3'-phosphorothioate
  modified_base 2: mod_base = OTHER; note = 2'-O-methylguanosine-3'-phosphorothioate
  modified_base 3: mod_base = OTHER; note = 2'-O-methylguanosine-3'-phosphate
  modified_base 4: mod_base = OTHER; note = 2'-O-methyladenosine-3'-phosphate
  modified_base 5: mod_base = OTHER; note = 2'-O-methylcytidine-3'-phosphate
  modified_base 6: mod_base = OTHER; note = 2'-O-methyladenosine-3'-phosphate
  modified_base 7: mod_base = OTHER; note = 2'-deoxy-2'-fluorouridine-3'-phosphate
  modified_base 8: mod_base = OTHER; note = 2'-O-methylguanosine-3'-phosphate
  modified_base 9: mod_base = OTHER; note = 2'-deoxy-2'-fluoroadenosine-3'-phosphate
  modified_base 10: mod_base = OTHER; note = 2'-deoxy-2'-fluoroadenosine-3'-phosphate
  modified_base 11: mod_base = OTHER; note = 2'-deoxy-2'-fluoroadenosine-3'-phosphate
  modified_base 12: mod_base = OTHER; note = 2'-O-methyluridine-3'-phosphate
  modified_base 13: mod_base = OTHER; note = 2'-O-methyladenosine-3'-phosphate
  modified_base 14: mod_base = OTHER; note = 2'-O-methylguanosine-3'-phosphate
  modified_base 15: mod_base = OTHER; note = 2'-O-methyluridine-3'-phosphate
  modified_base 16: mod_base = OTHER; note = 2'-O-methyluridine-3'-phosphate
  modified_base 17: mod_base = OTHER; note = 2'-O-methylguanosine-3'-phosphate
  modified_base 18: mod_base = OTHER; note = 2'-O-methyluridine-3'-phosphate
  modified_base 19: mod_base = OTHER; note = 2'-O-methylcytidine-3'-phosphate
  modified_base 20: mod_base = OTHER; note = 2'-O-methylcytidine-3'-phosphate
  modified_base 21: mod_base = OTHER; note = 2'-O-methyluridine-3'-phosphate ((2S,4R)-1-[29-[[2-(acetylamino)-2-deoxy-beta-D-galactopyra nosyl]oxy]-14,14-bis[[3-[[3-[[5-[[2-(acetylamino)-2-deoxy-b eta-D-galactopyranosyl]oxy]-1-oxopentyl]amino]propyl]amino] -3-oxopropoxy]methyl]-1,12,19,25-tetraoxo-16-oxa-13,20,24-t riazanonacos-1-yl]-4-hydroxy-2-pyrrolidinyl)methyl ester
gggacatgaaatagttgtcct

SEQ ID NO: 168 - RNA, 23 nt, synthetic construct
  source 1..23: mol_type = other RNA
  modified_base 1: mod_base = OTHER; note = 2'-O-methyladenosine-3'-phosphorothioate
  modified_base 2: mod_base = OTHER; note = 2'-deoxy-2'-fluoroguanosine-3'-phosphorothioate
  modified_base 3: mod_base = OTHER; note = 2'-O-methylguanosine-3'-phosphate
  modified_base 4: mod_base = OTHER; note = 2'-O-methyladenosine-3'-phosphate
  modified_base 5: mod_base = OTHER; note = 2'-O-methylcytidine-3'-phosphate
  modified_base 6: mod_base = OTHER; note = 2'-deoxy-2'-fluoroadenosine-3'-phosphate
  modified_base 7: mod_base = OTHER; note = 2'-O-methyladenosine-3'-phosphate
  modified_base 8: mod_base = OTHER; note = 2'-deoxy-2'-fluorocytidine-3'-phosphate
  modified_base 9: mod_base = OTHER; note = 2'-deoxy-2'-fluorouridine-3'-phosphate
  modified_base 10: mod_base = OTHER; note = 2'-O-methyladenosine-3'-phosphate
  modified_base 11: mod_base = OTHER; note = 2'-O-methyluridine-3'-phosphate
  modified_base 12: mod_base = OTHER; note = 2'-O-methyluridine-3'-phosphate
  modified_base 13: mod_base = OTHER; note = 2'-O-methyluridine-3'-phosphate
  modified_base 14: mod_base = OTHER; note = 2'-deoxy-2'-fluorocytidine-3'-phosphate
  modified_base 15: mod_base = OTHER; note = 2'-O-methyladenosine-3'-phosphate
  modified_base 16: mod_base = OTHER; note = 2'-deoxy-2'-fluorouridine-3'-phosphate
  modified_base 17: mod_base = OTHER; note = 2'-O-methylguanosine-3'-phosphate
  modified_base 18: mod_base = OTHER; note = 2'-O-methyluridine-3'-phosphate
  modified_base 19: mod_base = OTHER; note = 2'-O-methylcytidine-3'-phosphate
  modified_base 20: mod_base = OTHER; note = 2'-O-methylcytidine-3'-phosphate
  modified_base 21: mod_base = OTHER; note = 2'-O-methylcytidine-3'-phosphorothioate
  modified_base 22: mod_base = OTHER; note = 2'-O-methylcytidine-3'-phosphorothioate
  modified_base 23: mod_base = OTHER; note = 2'-O-methyluridine
aggacaactatttcatgtcccct

SEQ ID NO: 169 - RNA, 21 nt, synthetic construct
  source 1..21: mol_type = other RNA
  modified_base 1: mod_base = OTHER; note = 2'-O-methyladenosine-3'-phosphorothioate
  modified_base 2: mod_base = OTHER; note = 2'-O-methylcytidine-3'-phosphorothioate
  modified_base 3: mod_base = OTHER; note = 2'-O-methyladenosine-3'-phosphate
  modified_base 4: mod_base = OTHER; note = 2'-O-methylcytidine-3'-phosphate
  modified_base 5: mod_base = OTHER; note = 2'-O-methylcytidine-3'-phosphate
  modified_base 6: mod_base = OTHER; note = 2'-O-methyluridine-3'-phosphate
  modified_base 7: mod_base = OTHER; note = 2'-deoxy-2'-fluorouridine-3'-phosphate
  modified_base 8: mod_base = OTHER; note = 2'-O-methylguanosine-3'-phosphate
  modified_base 9: mod_base = OTHER; note = 2'-deoxy-2'-fluoroadenosine-3'-phosphate
  modified_base 10: mod_base = OTHER; note = 2'-deoxy-2'-fluoroadenosine-3'-phosphate
  modified_base 11: mod_base = OTHER; note = 2'-deoxy-2'-fluoroguanosine-3'-phosphate
  modified_base 12: mod_base = OTHER; note = 2'-O-methyladenosine-3'-phosphate
  modified_base 13: mod_base = OTHER; note = 2'-O-methylcytidine-3'-phosphate
  modified_base 14: mod_base = OTHER; note = 2'-O-methylguanosine-3'-phosphate
  modified_base 15: mod_base = OTHER; note = 2'-O-methyluridine-3'-phosphate
  modified_base 16: mod_base = OTHER; note = 2'-O-methyladenosine-3'-phosphate
  modified_base 17: mod_base = OTHER; note = 2'-O-methylcytidine-3'-phosphate
  modified_base 18: mod_base = OTHER; note = 2'-O-methylcytidine-3'-phosphate
  modified_base 19: mod_base = OTHER; note = 2'-O-methylcytidine-3'-phosphate
  modified_base 20: mod_base = OTHER; note = 2'-O-methyluridine-3'-phosphate
  modified_base 21: mod_base = OTHER; note = 2'-O-methyluridine-3'-phosphate ((2S,4R)-1-[29-[[2-(acetylamino)-2-deoxy-beta-D-galactopyra nosyl]oxy]-14,14-bis[[3-[[3-[[5-[[2-(acetylamino)-2-deoxy-b eta-D-galactopyranosyl]oxy]-1-oxopentyl]amino]propyl]amino] -3-oxopropoxy]methyl]-1,12,19,25-tetraoxo-16-oxa-13,20,24-t riazanonacos-1-yl]-4-hydroxy-2-pyrrolidinyl)methyl ester
acaccttgaagacgtaccctt

SEQ ID NO: 170 - RNA, 23 nt, synthetic construct
  source 1..23: mol_type = other RNA
  modified_base 1: mod_base = OTHER; note = 2'-O-methyladenosine-3'-phosphorothioate
  modified_base 2: mod_base = OTHER; note = 2'-deoxy-2'-fluoroadenosine-3'-phosphorothioate
  modified_base 3: mod_base = OTHER; note = 2'-O-methylguanosine-3'-phosphate
  modified_base 4: mod_base = OTHER; note = 2'-O-methylguanosine-3'-phosphate
  modified_base 5: mod_base = OTHER; note = 2'-O-methylguanosine-3'-phosphate
  modified_base 6: mod_base = OTHER; note = 2'-deoxy-2'-fluorouridine-3'-phosphate
  modified_base 7: mod_base = OTHER; note = 2'-O-methyladenosine-3'-phosphate
  modified_base 8: mod_base = OTHER; note = 2'-deoxy-2'-fluorocytidine-3'-phosphate
  modified_base 9: mod_base = OTHER; note = 2'-deoxy-2'-fluoroguanosine-3'-phosphate
  modified_base 10: mod_base = OTHER; note = 2'-O-methyluridine-3'-phosphate
  modified_base 11: mod_base = OTHER; note = 2'-O-methylcytidine-3'-phosphate
  modified_base 12: mod_base = OTHER; note = 2'-O-methyluridine-3'-phosphate
  modified_base 13: mod_base = OTHER; note = 2'-O-methyluridine-3'-phosphate
  modified_base 14: mod_base = OTHER; note = 2'-deoxy-2'-fluorocytidine-3'-phosphate
  modified_base 15: mod_base = OTHER; note = 2'-O-methyladenosine-3'-phosphate
  modified_base 16: mod_base = OTHER; note = 2'-deoxy-2'-fluoroadenosine-3'-phosphate
  modified_base 17: mod_base = OTHER; note = 2'-O-methylguanosine-3'-phosphate
  modified_base 18: mod_base = OTHER; note = 2'-O-methylguanosine-3'-phosphate
  modified_base 19: mod_base = OTHER; note = 2'-O-methyluridine-3'-phosphate
  modified_base 20: mod_base = OTHER; note = 2'-O-methylguanosine-3'-phosphate
  modified_base 21: mod_base = OTHER; note = 2'-O-methyluridine-3'-phosphorothioate
  modified_base 22: mod_base = OTHER; note = 2'-O-methyladenosine-3'-phosphorothioate
  modified_base 23: mod_base = OTHER; note = 2'-O-methyladenosine
aagggtacgtcttcaaggtgtaa

SEQ ID NO: 171 - RNA, 21 nt, synthetic construct
  source 1..21: mol_type = other RNA
  modified_base 1: mod_base = OTHER; note = 2'-O-methylcytidine-3'-phosphorothioate
  modified_base 2: mod_base = OTHER; note = 2'-O-methylcytidine-3'-phosphorothioate
  modified_base 3: mod_base = OTHER; note = 2'-O-methylcytidine-3'-phosphate
  modified_base 4: mod_base = OTHER; note = 2'-O-methyluridine-3'-phosphate
  modified_base 5: mod_base = OTHER; note = 2'-O-methylguanosine-3'-phosphate
  modified_base 6: mod_base = OTHER; note = 2'-O-methyluridine-3'-phosphate
  modified_base 7: mod_base = OTHER; note = 2'-deoxy-2'-fluoroguanosine-3'-phosphate
  modified_base 8: mod_base = OTHER; note = 2'-O-methylcytidine-3'-phosphate
  modified_base 9: mod_base = OTHER; note = 2'-deoxy-2'-fluorocytidine-3'-phosphate
  modified_base 10: mod_base = OTHER; note = 2'-deoxy-2'-fluoroadenosine-3'-phosphate
  modified_base 11: mod_base = OTHER; note = 2'-deoxy-2'-fluorouridine-3'-phosphate
  modified_base 12: mod_base = OTHER; note = 2'-O-methyluridine-3'-phosphate
  modified_base 13: mod_base = OTHER; note = 2'-O-methylcytidine-3'-phosphate
  modified_base 14: mod_base = OTHER; note = 2'-O-methylcytidine-3'-phosphate
  modified_base 15: mod_base = OTHER; note = 2'-O-methyladenosine-3'-phosphate
  modified_base 16: mod_base = OTHER; note = 2'-O-methyladenosine-3'-phosphate
  modified_base 17: mod_base = OTHER; note = 2'-O-methyladenosine-3'-phosphate
  modified_base 18: mod_base = OTHER; note = 2'-O-methylguanosine-3'-phosphate
  modified_base 19: mod_base = OTHER; note = 2'-O-methylguanosine-3'-phosphate
  modified_base 20: mod_base = OTHER; note = 2'-O-methylguanosine-3'-phosphate
  modified_base 21: mod_base = OTHER; note = 2'-O-methyluridine-3'-phosphate ((2S,4R)-1-[29-[[2-(acetylamino)-2-deoxy-beta-D-galactopyra nosyl]oxy]-14,14-bis[[3-[[3-[[5-[[2-(acetylamino)-2-deoxy-b eta-D-galactopyranosyl]oxy]-1-oxopentyl]amino]propyl]amino] -3-oxopropoxy]methyl]-1,12,19,25-tetraoxo-16-oxa-13,20,24-t riazanonacos-1-yl]-4-hydroxy-2-pyrrolidinyl)methyl ester
ccctgtgccattccaaagggt

SEQ ID NO: 172 - RNA, 23 nt, synthetic construct
  source 1..23: mol_type = other RNA
  modified_base 1: mod_base = OTHER; note = 2'-O-methyladenosine-3'-phosphorothioate
  modified_base 2: mod_base = OTHER; note = 2'-deoxy-2'-fluorocytidine-3'-phosphorothioate
  modified_base 3: mod_base = OTHER; note = 2'-O-methylcytidine-3'-phosphate
  modified_base 4: mod_base = OTHER; note = 2'-O-methylcytidine-3'-phosphate
  modified_base 5: mod_base = OTHER; note = 2'-O-methyluridine-3'-phosphate
  modified_base 6: mod_base = OTHER; note = 2'-deoxy-2'-fluorouridine-3'-phosphate
  modified_base 7: mod_base = OTHER; note = 2'-O-methyluridine-3'-phosphate
  modified_base 8: mod_base = OTHER; note = 2'-deoxy-2'-fluoroguanosine-3'-phosphate
  modified_base 9: mod_base = OTHER; note = 2'-deoxy-2'-fluoroguanosine-3'-phosphate
  modified_base 10: mod_base = OTHER; note = 2'-O-methyladenosine-3'-phosphate
  modified_base 11: mod_base = OTHER; note = 2'-O-methyladenosine-3'-phosphate
  modified_base 12: mod_base = OTHER; note = 2'-O-methyluridine-3'-phosphate
  modified_base 13: mod_base = OTHER; note = 2'-O-methylguanosine-3'-phosphate
  modified_base 14: mod_base = OTHER; note = 2'-deoxy-2'-fluoroguanosine-3'-phosphate
  modified_base 15: mod_base = OTHER; note = 2'-O-methylcytidine-3'-phosphate
  modified_base 16: mod_base = OTHER; note = 2'-deoxy-2'-fluoroadenosine-3'-phosphate
  modified_base 17: mod_base = OTHER; note = 2'-O-methylcytidine-3'-phosphate
  modified_base 18: mod_base = OTHER; note = 2'-O-methyladenosine-3'-phosphate
  modified_base 19: mod_base = OTHER; note = 2'-O-methylguanosine-3'-phosphate
  modified_base 20: mod_base = OTHER; note = 2'-O-methylguanosine-3'-phosphate
  modified_base 21: mod_base = OTHER; note = 2'-O-methylguanosine-3'-phosphorothioate
  modified_base 22: mod_base = OTHER; note = 2'-O-methyluridine-3'-phosphorothioate
  modified_base 23: mod_base = OTHER; note = 2'-O-methyladenosine
accctttggaatggcacagggta

SEQ ID NO: 173 - RNA, 21 nt, synthetic construct
  source 1..21: mol_type = other RNA
  modified_base 1: mod_base = OTHER; note = 2'-O-methylcytidine-3'-phosphorothioate
  modified_base 2: mod_base = OTHER; note = 2'-O-methylcytidine-3'-phosphorothioate
  modified_base 3: mod_base = OTHER; note = 2'-O-methyluridine-3'-phosphate
  modified_base 4: mod_base = OTHER; note = 2'-O-methylguanosine-3'-phosphate
  modified_base 5: mod_base = OTHER; note = 2'-O-methyluridine-3'-phosphate
  modified_base 6: mod_base = OTHER; note = 2'-O-methylguanosine-3'-phosphate
  modified_base 7: mod_base = OTHER; note = 2'-deoxy-2'-fluorocytidine-3'-phosphate
  modified_base 8: mod_base = OTHER; note = 2'-O-methylcytidine-3'-phosphate
  modified_base 9: mod_base = OTHER; note = 2'-deoxy-2'-fluoroadenosine-3'-phosphate
  modified_base 10: mod_base = OTHER; note = 2'-deoxy-2'-fluorouridine-3'-phosphate
  modified_base 11: mod_base = OTHER; note = 2'-deoxy-2'-fluorouridine-3'-phosphate
  modified_base 12: mod_base = OTHER; note = 2'-O-methylcytidine-3'-phosphate
  modified_base 13: mod_base = OTHER; note = 2'-O-methylcytidine-3'-phosphate
  modified_base 14: mod_base = OTHER; note = 2'-O-methyladenosine-3'-phosphate
  modified_base 15: mod_base = OTHER; note = 2'-O-methyladenosine-3'-phosphate
  modified_base 16: mod_base = OTHER; note = 2'-O-methyladenosine-3'-phosphate
  modified_base 17: mod_base = OTHER; note = 2'-O-methylguanosine-3'-phosphate
  modified_base 18: mod_base = OTHER; note = 2'-O-methylguanosine-3'-phosphate
  modified_base 19: mod_base = OTHER; note = 2'-O-methylguanosine-3'-phosphate
  modified_base 20: mod_base = OTHER; note = 2'-O-methyladenosine-3'-phosphate
  modified_base 21: mod_base = OTHER; note = 2'-O-methyluridine-3'-phosphate ((2S,4R)-1-[29-[[2-(acetylamino)-2-deoxy-beta-D-galactopyra nosyl]oxy]-14,14-bis[[3-[[3-[[5-[[2-(acetylamino)-2-deoxy-b eta-D-galactopyranosyl]oxy]-1-oxopentyl]amino]propyl]amino] -3-oxopropoxy]methyl]-1,12,19,25-tetraoxo-16-oxa-13,20,24-t riazanonacos-1-yl]-4-hydroxy-2-pyrrolidinyl)methyl ester
cctgtgccattccaaagggat

SEQ ID NO: 174 - RNA, 23 nt, synthetic construct
  source 1..23: mol_type = other RNA
  modified_base 1: mod_base = OTHER; note = 2'-O-methyladenosine-3'-phosphorothioate
  modified_base 2: mod_base = OTHER; note = 2'-deoxy-2'-fluorouridine-3'-phosphorothioate
  modified_base 3: mod_base = OTHER; note = 2'-O-methylcytidine-3'-phosphate
  modified_base 4: mod_base = OTHER; note = 2'-O-methylcytidine-3'-phosphate
  modified_base 5: mod_base = OTHER; note = 2'-O-methylcytidine-3'-phosphate
  modified_base 6: mod_base = OTHER; note = 2'-deoxy-2'-fluorouridine-3'-phosphate
  modified_base 7: mod_base = OTHER; note = 2'-O-methyluridine-3'-phosphate
  modified_base 8: mod_base = OTHER; note = 2'-deoxy-2'-fluorouridine-3'-phosphate
  modified_base 9: mod_base = OTHER; note = 2'-deoxy-2'-fluoroguanosine-3'-phosphate
  modified_base 10: mod_base = OTHER; note = 2'-O-methylguanosine-3'-phosphate
  modified_base 11: mod_base = OTHER; note = 2'-O-methyladenosine-3'-phosphate
  modified_base 12: mod_base = OTHER; note = 2'-O-methyladenosine-3'-phosphate
  modified_base 13: mod_base = OTHER; note = 2'-O-methyluridine-3'-phosphate
  modified_base 14: mod_base = OTHER; note = 2'-deoxy-2'-fluoroguanosine-3'-phosphate
  modified_base 15: mod_base = OTHER; note = 2'-O-methylguanosine-3'-phosphate
  modified_base 16: mod_base = OTHER; note = 2'-deoxy-2'-fluorocytidine-3'-phosphate
  modified_base 17: mod_base = OTHER; note = 2'-O-methyladenosine-3'-phosphate
  modified_base 18: mod_base = OTHER; note = 2'-O-methylcytidine-3'-phosphate
  modified_base 19: mod_base = OTHER; note = 2'-O-methyladenosine-3'-phosphate
  modified_base 20: mod_base = OTHER; note = 2'-O-methylguanosine-3'-phosphate
  modified_base 21: mod_base = OTHER; note = 2'-O-methylguanosine-3'-phosphorothioate
  modified_base 22: mod_base = OTHER; note = 2'-O-methylguanosine-3'-phosphorothioate
  modified_base 23: mod_base = OTHER; note = 2'-O-methyluridine
atccctttggaatggcacagggt

SEQ ID NO: 175 - RNA, 21 nt, synthetic construct
  source 1..21: mol_type = other RNA
  modified_base 1: mod_base = OTHER; note = 2'-O-methylcytidine-3'-phosphorothioate
  modified_base 2: mod_base = OTHER; note = 2'-O-methyluridine-3'-phosphorothioate
  modified_base 3: mod_base = OTHER; note = 2'-O-methylguanosine-3'-phosphate
  modified_base 4: mod_base = OTHER; note = 2'-O-methylcytidine-3'-phosphate
  modified_base 5: mod_base = OTHER; note = 2'-O-methyluridine-3'-phosphate
  modified_base 6: mod_base = OTHER; note = 2'-O-methyladenosine-3'-phosphate
  modified_base 7: mod_base = OTHER; note = 2'-deoxy-2'-fluorouridine-3'-phosphate
  modified_base 8: mod_base = OTHER; note = 2'-O-methylguanosine-3'-phosphate
  modified_base 9: mod_base = OTHER; note = 2'-deoxy-2'-fluorocytidine-3'-phosphate
  modified_base 10: mod_base = OTHER; note = 2'-deoxy-2'-fluorouridine-3'-phosphate
  modified_base 11: mod_base = OTHER; note = 2'-deoxy-2'-fluorouridine-3'-phosphate
  modified_base 12: mod_base = OTHER; note = 2'-O-methyluridine-3'-phosphate
  modified_base 13: mod_base = OTHER; note = 2'-O-methyluridine-3'-phosphate
  modified_base 14: mod_base = OTHER; note = 2'-O-methylguanosine-3'-phosphate
  modified_base 15: mod_base = OTHER; note = 2'-O-methyluridine-3'-phosphate
  modified_base 16: mod_base = OTHER; note = 2'-O-methylcytidine-3'-phosphate
  modified_base 17: mod_base = OTHER; note = 2'-O-methyluridine-3'-phosphate
  modified_base 18: mod_base = OTHER; note = 2'-O-methylguanosine-3'-phosphate
  modified_base 19: mod_base = OTHER; note = 2'-O-methylguanosine-3'-phosphate
  modified_base 20: mod_base = OTHER; note = 2'-O-methylcytidine-3'-phosphate
  modified_base 21: mod_base = OTHER; note = 2'-O-methyluridine-3'-phosphate ((2S,4R)-1-[29-[[2-(acetylamino)-2-deoxy-beta-D-galactopyra nosyl]oxy]-14,14-bis[[3-[[3-[[5-[[2-(acetylamino)-2-deoxy-b eta-D-galactopyranosyl]oxy]-1-oxopentyl]amino]propyl]amino] -3-oxopropoxy]methyl]-1,12,19,25-tetraoxo-16-oxa-13,20,24-t riazanonacos-1-yl]-4-hydroxy-2-pyrrolidinyl)methyl ester
ctgctatgcttttgtctggct

SEQ ID NO: 176 - RNA, 23 nt, synthetic construct
  source 1..23: mol_type = other RNA
  modified_base 1: mod_base = OTHER; note = 2'-O-methyladenosine-3'-phosphorothioate
  modified_base 2: mod_base = OTHER; note = 2'-deoxy-2'-fluoroguanosine-3'-phosphorothioate
  modified_base 3: mod_base = OTHER; note = 2'-O-methylcytidine-3'-phosphate
  modified_base 4: mod_base = OTHER; note = 2'-O-methylcytidine-3'-phosphate
  modified_base 5: mod_base = OTHER; note = 2'-O-methyladenosine-3'-phosphate
  modified_base 6: mod_base = OTHER; note = 2'-deoxy-2'-fluoroguanosine-3'-phosphate
  modified_base 7: mod_base = OTHER; note = 2'-O-methyladenosine-3'-phosphate
  modified_base 8: mod_base = OTHER; note = 2'-deoxy-2'-fluorocytidine-3'-phosphate
  modified_base 9: mod_base = OTHER; note = 2'-deoxy-2'-fluoroadenosine-3'-phosphate
  modified_base 10: mod_base = OTHER; note = 2'-O-methyladenosine-3'-phosphate
  modified_base 11: mod_base = OTHER; note = 2'-O-methyladenosine-3'-phosphate
  modified_base 12: mod_base = OTHER; note = 2'-O-methyladenosine-3'-phosphate
  modified_base 13: mod_base = OTHER; note = 2'-O-methylguanosine-3'-phosphate
  modified_base 14: mod_base = OTHER; note = 2'-deoxy-2'-fluorocytidine-3'-phosphate
  modified_base 15: mod_base = OTHER; note = 2'-O-methyladenosine-3'-phosphate
  modified_base 16: mod_base = OTHER; note = 2'-deoxy-2'-fluorouridine-3'-phosphate
  modified_base 17: mod_base = OTHER; note = 2'-O-methyladenosine-3'-phosphate
  modified_base 18: mod_base = OTHER; note = 2'-O-methylguanosine-3'-phosphate
  modified_base 19: mod_base = OTHER; note = 2'-O-methylcytidine-3'-phosphate
  modified_base 20: mod_base = OTHER; note = 2'-O-methyladenosine-3'-phosphate
  modified_base 21: mod_base = OTHER; note = 2'-O-methylguanosine-3'-phosphorothioate
  modified_base 22: mod_base = OTHER; note = 2'-O-methyladenosine-3'-phosphorothioate
  modified_base 23: mod_base = OTHER; note = 2'-O-methylguanosine
agccagacaaaagcatagcagag

SEQ ID NO: 177 - RNA, 21 nt, synthetic construct
  source 1..21: mol_type = other RNA
  modified_base 1: mod_base = OTHER; note = 2'-O-methylcytidine-3'-phosphorothioate
  modified_base 2: mod_base = OTHER; note = 2'-O-methyladenosine-3'-phosphorothioate
  modified_base 3: mod_base = OTHER; note = 2'-O-methylguanosine-3'-phosphate
  modified_base 4: mod_base = OTHER; note = 2'-O-methyladenosine-3'-phosphate
  modified_base 5: mod_base = OTHER; note = 2'-O-methyluridine-3'-phosphate
  modified_base 6: mod_base = OTHER; note = 2'-O-methylcytidine-3'-phosphate
  modified_base 7: mod_base = OTHER; note = 2'-deoxy-2'-fluoroadenosine-3'-phosphate
  modified_base 8: mod_base = OTHER; note = 2'-O-methylcytidine-3'-phosphate
  modified_base 9: mod_base = OTHER; note = 2'-deoxy-2'-fluoroadenosine-3'-phosphate
  modified_base 10: mod_base = OTHER; note = 2'-deoxy-2'-fluorouridine-3'-phosphate
  modified_base 11: mod_base = OTHER; note = 2'-deoxy-2'-fluoroguanosine-3'-phosphate
  modified_base 12: mod_base = OTHER; note = 2'-O-methyladenosine-3'-phosphate
  modified_base 13: mod_base = OTHER; note = 2'-O-methylcytidine-3'-phosphate
  modified_base 14: mod_base = OTHER; note = 2'-O-methylcytidine-3'-phosphate
  modified_base 15: mod_base = OTHER; note = 2'-O-methyluridine-3'-phosphate
  modified_base 16: mod_base = OTHER; note = 2'-O-methyluridine-3'-phosphate
  modified_base 17: mod_base = OTHER; note = 2'-O-methylcytidine-3'-phosphate
  modified_base 18: mod_base = OTHER; note = 2'-O-methylcytidine-3'-phosphate
  modified_base 19: mod_base = OTHER; note = 2'-O-methyluridine-3'-phosphate
  modified_base 20: mod_base = OTHER; note = 2'-O-methylguanosine-3'-phosphate
  modified_base 21: mod_base = OTHER; note = 2'-O-methyluridine-3'-phosphate ((2S,4R)-1-[29-[[2-(acetylamino)-2-deoxy-beta-D-galactopyra nosyl]oxy]-14,14-bis[[3-[[3-[[5-[[2-(acetylamino)-2-deoxy-b eta-D-galactopyranosyl]oxy]-1-oxopentyl]amino]propyl]amino] -3-oxopropoxy]methyl]-1,12,19,25-tetraoxo-16-oxa-13,20,24-t riazanonacos-1-yl]-4-hydroxy-2-pyrrolidinyl)methyl ester
cagatcacatgaccttcctgt

SEQ ID NO: 178 - RNA, 23 nt, synthetic construct
  source 1..23: mol_type = other RNA
  modified_base 1: mod_base = OTHER; note = 2'-O-methyladenosine-3'-phosphorothioate
  modified_base 2: mod_base = OTHER; note = 2'-deoxy-2'-fluorocytidine-3'-phosphorothioate
  modified_base 3: mod_base = OTHER; note = 2'-O-methyladenosine-3'-phosphate
  modified_base 4: mod_base = OTHER; note = 2'-O-methylguanosine-3'-phosphate
  modified_base 5: mod_base = OTHER; note = 2'-O-methylguanosine-3'-phosphate
  modified_base 6: mod_base = OTHER; note = 2'-deoxy-2'-fluoroadenosine-3'-phosphate
  modified_base 7: mod_base = OTHER; note = 2'-O-methyladenosine-3'-phosphate
  modified_base 8: mod_base = OTHER; note = 2'-deoxy-2'-fluoroguanosine-3'-phosphate
  modified_base 9: mod_base = OTHER; note = 2'-deoxy-2'-fluoroguanosine-3'-phosphate
  modified_base 10: mod_base = OTHER; note = 2'-O-methyluridine-3'-phosphate
  modified_base 11: mod_base = OTHER; note = 2'-O-methylcytidine-3'-phosphate
  modified_base 12: mod_base = OTHER; note = 2'-O-methyladenosine-3'-phosphate
  modified_base 13: mod_base = OTHER; note = 2'-O-methyluridine-3'-phosphate
  modified_base 14: mod_base = OTHER; note = 2'-deoxy-2'-fluoroguanosine-3'-phosphate
  modified_base 15: mod_base = OTHER; note = 2'-O-methyluridine-3'-phosphate
  modified_base 16: mod_base = OTHER; note = 2'-deoxy-2'-fluoroguanosine-3'-phosphate
  modified_base 17: mod_base = OTHER; note = 2'-O-methyladenosine-3'-phosphate
  modified_base 18: mod_base = OTHER; note = 2'-O-methyluridine-3'-phosphate
  modified_base 19: mod_base = OTHER; note = 2'-O-methylcytidine-3'-phosphate
  modified_base 20: mod_base = OTHER; note = 2'-O-methyluridine-3'-phosphate
  modified_base 21: mod_base = OTHER; note = 2'-O-methylguanosine-3'-phosphorothioate
  modified_base 22: mod_base = OTHER; note = 2'-O-methyladenosine-3'-phosphorothioate
  modified_base 23: mod_base = OTHER; note = 2'-O-methyladenosine
acaggaaggtcatgtgatctgaa

SEQ ID NO: 179 - RNA, 21 nt, synthetic construct
  source 1..21: mol_type = other RNA
  modified_base 1: mod_base = OTHER; note = 2'-O-methyladenosine-3'-phosphorothioate
  modified_base 2: mod_base = OTHER; note = 2'-O-methylguanosine-3'-phosphorothioate
  modified_base 3: mod_base = OTHER; note = 2'-O-methyladenosine-3'-phosphate
  modified_base 4: mod_base = OTHER; note = 2'-O-methyluridine-3'-phosphate
  modified_base 5: mod_base = OTHER; note = 2'-O-methylcytidine-3'-phosphate
  modified_base 6: mod_base = OTHER; note = 2'-O-methyladenosine-3'-phosphate
  modified_base 7: mod_base = OTHER; note = 2'-deoxy-2'-fluorocytidine-3'-phosphate
  modified_base 8: mod_base = OTHER; note = 2'-O-methyladenosine-3'-phosphate
  modified_base 9: mod_base = OTHER; note = 2'-deoxy-2'-fluorouridine-3'-phosphate
  modified_base 10: mod_base = OTHER; note = 2'-deoxy-2'-fluoroguanosine-3'-phosphate
  modified_base 11: mod_base = OTHER; note = 2'-deoxy-2'-fluoroadenosine-3'-phosphate
  modified_base 12: mod_base = OTHER; note = 2'-O-methylcytidine-3'-phosphate
  modified_base 13: mod_base = OTHER; note = 2'-O-methylcytidine-3'-phosphate
  modified_base 14: mod_base = OTHER; note = 2'-O-methyluridine-3'-phosphate
  modified_base 15: mod_base = OTHER; note = 2'-O-methyluridine-3'-phosphate
  modified_base 16: mod_base = OTHER; note = 2'-O-methylcytidine-3'-phosphate
  modified_base 17: mod_base = OTHER; note = 2'-O-methylcytidine-3'-phosphate
  modified_base 18: mod_base = OTHER; note = 2'-O-methyluridine-3'-phosphate
  modified_base 19: mod_base = OTHER; note = 2'-O-methylguanosine-3'-phosphate
  modified_base 20: mod_base = OTHER; note = 2'-O-methylcytidine-3'-phosphate
  modified_base 21: mod_base = OTHER; note = 2'-O-methyluridine-3'-phosphate ((2S,4R)-1-[29-[[2-(acetylamino)-2-deoxy-beta-D-galactopyra nosyl]oxy]-14,14-bis[[3-[[3-[[5-[[2-(acetylamino)-2-deoxy-b eta-D-galactopyranosyl]oxy]-1-oxopentyl]amino]propyl]amino] -3-oxopropoxy]methyl]-1,12,19,25-tetraoxo-16-oxa-13,20,24-t riazanonacos-1-yl]-4-hydroxy-2-pyrrolidinyl)methyl ester
agatcacatgaccttcctgct

SEQ ID NO: 180 - RNA, 23 nt, synthetic construct
  source 1..23: mol_type = other RNA
  modified_base 1: mod_base = OTHER; note = 2'-O-methyladenosine-3'-phosphorothioate
  modified_base 2: mod_base = OTHER; note = 2'-deoxy-2'-fluoroguanosine-3'-phosphorothioate
  modified_base 3: mod_base = OTHER; note = 2'-O-methylcytidine-3'-phosphate
  modified_base 4: mod_base = OTHER; note = 2'-O-methyladenosine-3'-phosphate
  modified_base 5: mod_base = OTHER; note = 2'-O-methylguanosine-3'-phosphate
  modified_base 6: mod_base = OTHER; note = 2'-deoxy-2'-fluoroguanosine-3'-phosphate
  modified_base 7: mod_base = OTHER; note = 2'-O-methyladenosine-3'-phosphate
  modified_base 8: mod_base = OTHER; note = 2'-deoxy-2'-fluoroadenosine-3'-phosphate
  modified_base 9: mod_base = OTHER; note = 2'-deoxy-2'-fluoroguanosine-3'-phosphate
  modified_base 10: mod_base = OTHER; note = 2'-O-methylguanosine-3'-phosphate
  modified_base 11: mod_base = OTHER; note = 2'-O-methyluridine-3'-phosphate
  modified_base 12: mod_base = OTHER; note = 2'-O-methylcytidine-3'-phosphate
  modified_base 13: mod_base = OTHER; note = 2'-O-methyladenosine-3'-phosphate
  modified_base 14: mod_base = OTHER; note = 2'-deoxy-2'-fluorouridine-3'-phosphate
  modified_base 15: mod_base = OTHER; note = 2'-O-methylguanosine-3'-phosphate
  modified_base 16: mod_base = OTHER; note = 2'-deoxy-2'-fluorouridine-3'-phosphate
  modified_base 17: mod_base = OTHER; note = 2'-O-methylguanosine-3'-phosphate
  modified_base 18: mod_base = OTHER; note = 2'-O-methyladenosine-3'-phosphate
  modified_base 19: mod_base = OTHER; note = 2'-O-methyluridine-3'-phosphate
  modified_base 20: mod_base = OTHER; note = 2'-O-methylcytidine-3'-phosphate
  modified_base 21: mod_base = OTHER; note = 2'-O-methyluridine-3'-phosphorothioate
  modified_base 22: mod_base = OTHER; note = 2'-O-methylguanosine-3'-phosphorothioate
  modified_base 23: mod_base = OTHER; note = 2'-O-methyladenosine
agcaggaaggtcatgtgatctga

SEQ ID NO: 181 - RNA, 21 nt, synthetic construct
  source 1..21: mol_type = other RNA
  modified_base 1: mod_base = OTHER; note = 2'-O-methyladenosine-3'-phosphorothioate
  modified_base 2: mod_base = OTHER; note = 2'-O-methylcytidine-3'-phosphorothioate
  modified_base 3: mod_base = OTHER; note = 2'-O-methyladenosine-3'-phosphate
  modified_base 4: mod_base = OTHER; note = 2'-O-methylguanosine-3'-phosphate
  modified_base 5: mod_base = OTHER; note = 2'-O-methyladenosine-3'-phosphate
  modified_base 6: mod_base = OTHER; note = 2'-O-methyladenosine-3'-phosphate
  modified_base 7: mod_base = OTHER; note = 2'-deoxy-2'-fluorocytidine-3'-phosphate
  modified_base 8: mod_base = OTHER; note = 2'-O-methyluridine-3'-phosphate
  modified_base 9: mod_base = OTHER; note = 2'-deoxy-2'-fluorouridine-3'-phosphate
  modified_base 10: mod_base = OTHER; note = 2'-deoxy-2'-fluorouridine-3'-phosphate
  modified_base 11: mod_base = OTHER; note = 2'-deoxy-2'-fluorocytidine-3'-phosphate
  modified_base 12: mod_base = OTHER; note = 2'-O-methyluridine-3'-phosphate
  modified_base 13: mod_base = OTHER; note = 2'-O-methylguanosine-3'-phosphate
  modified_base 14: mod_base = OTHER; note = 2'-O-methyluridine-3'-phosphate
  modified_base 15: mod_base = OTHER; note = 2'-O-methylguanosine-3'-phosphate
  modified_base 16: mod_base = OTHER; note = 2'-O-methylcytidine-3'-phosphate
  modified_base 17: mod_base = OTHER; note = 2'-O-methylguanosine-3'-phosphate
  modified_base 18: mod_base = OTHER; note = 2'-O-methyladenosine-3'-phosphate
  modified_base 19: mod_base = OTHER; note = 2'-O-methylcytidine-3'-phosphate
  modified_base 20: mod_base = OTHER; note = 2'-O-methylguanosine-3'-phosphate
  modified_base 21: mod_base = OTHER; note = 2'-O-methyluridine-3'-phosphate ((2S,4R)-1-[29-[[2-(acetylamino)-2-deoxy-beta-D-galactopyra nosyl]oxy]-14,14-bis[[3-[[3-[[5-[[2-(acetylamino)-2-deoxy-b eta-D-galactopyranosyl]oxy]-1-oxopentyl]amino]propyl]amino] -3-oxopropoxy]methyl]-1,12,19,25-tetraoxo-16-oxa-13,20,24-t riazanonacos-1-yl]-4-hydroxy-2-pyrrolidinyl)methyl ester
acagaactttctgtgcgacgt

SEQ ID NO: 182 - RNA, 23 nt, synthetic construct
  source 1..23: mol_type = other RNA
  modified_base 1: mod_base = OTHER; note = 2'-O-methyladenosine-3'-phosphorothioate
  modified_base 2: mod_base = OTHER; note = 2'-deoxy-2'-fluorocytidine-3'-phosphorothioate
  modified_base 3: mod_base = OTHER; note = 2'-O-methylguanosine-3'-phosphate
  modified_base 4: mod_base = OTHER; note = 2'-O-methyluridine-3'-phosphate
  modified_base 5: mod_base = OTHER; note = 2'-O-methylcytidine-3'-phosphate
  modified_base 6: mod_base = OTHER; note = 2'-deoxy-2'-fluoroguanosine-3'-phosphate
  modified_base 7: mod_base = OTHER; note = 2'-O-methylcytidine-3'-phosphate
  modified_base 8: mod_base = OTHER; note = 2'-deoxy-2'-fluoroadenosine-3'-phosphate
  modified_base 9: mod_base = OTHER; note = 2'-deoxy-2'-fluorocytidine-3'-phosphate
  modified_base 10: mod_base = OTHER; note = 2'-O-methyladenosine-3'-phosphate
  modified_base 11: mod_base = OTHER; note = 2'-O-methylguanosine-3'-phosphate
  modified_base 12: mod_base = OTHER; note = 2'-O-methyladenosine-3'-phosphate
  modified_base 13: mod_base = OTHER; note = 2'-O-methyladenosine-3'-phosphate
  modified_base 14: mod_base = OTHER; note = 2'-deoxy-2'-fluoroadenosine-3'-phosphate
  modified_base 15: mod_base = OTHER; note = 2'-O-methylguanosine-3'-phosphate
  modified_base 16: mod_base = OTHER; note = 2'-deoxy-2'-fluorouridine-3'-phosphate
  modified_base 17: mod_base = OTHER; note = 2'-O-methyluridine-3'-phosphate
  modified_base 18: mod_base = OTHER; note = 2'-O-methylcytidine-3'-phosphate
  modified_base 19: mod_base = OTHER; note = 2'-O-methyluridine-3'-phosphate
  modified_base 20: mod_base = OTHER; note = 2'-O-methylguanosine-3'-phosphate
  modified_base 21: mod_base = OTHER; note = 2'-O-methyluridine-3'-phosphorothioate
  modified_base 22: mod_base = OTHER; note = 2'-O-methylguanosine-3'-phosphorothioate
  modified_base 23: mod_base = OTHER; note = 2'-O-methyladenosine
acgtcgcacagaaagttctgtga

SEQ ID NO: 183 - RNA, 21 nt, synthetic construct
  source 1..21: mol_type = other RNA
gccttttcacagaactttctt

SEQ ID NO: 184 - RNA, 23 nt, synthetic construct
  source 1..23: mol_type = other RNA
aagaaagttctgtgaaaaggcaa

SEQ ID NO: 185 - RNA, 21 nt, synthetic construct
  source 1..21: mol_type = other RNA
catgctcattgccttttcact

SEQ ID NO: 186 - RNA, 23 nt, synthetic construct
  source 1..23: mol_type = other RNA
agtgaaaaggcaatgagcatgtt

SEQ ID NO: 187 - RNA, 21 nt, synthetic construct
  source 1..21: mol_type = other RNA
atgctcattgccttttcacat

SEQ ID NO: 188 - RNA, 23 nt, synthetic construct
  source 1..23: mol_type = other RNA
atgtgaaaaggcaatgagcatgt

SEQ ID NO: 189 - RNA, 21 nt, synthetic construct
  source 1..21: mol_type = other RNA
ccttttcacagaactttctgt

SEQ ID NO: 190 - RNA, 23 nt, synthetic construct
  source 1..23: mol_type = other RNA
acagaaagttctgtgaaaaggca

SEQ ID NO: 191 - RNA, 21 nt, synthetic construct
  source 1..21: mol_type = other RNA
cgggcataatgtttttgagat

SEQ ID NO: 192 - RNA, 23 nt, synthetic construct
  source 1..23: mol_type = other RNA
atctcaaaaacattatgcccgag

SEQ ID NO: 193 - RNA, 21 nt, synthetic construct
  source 1..21: mol_type = other RNA
ataatgtttttgagaatgatt

SEQ ID NO: 194 - RNA, 23 nt, synthetic construct
  source 1..23: mol_type = other RNA
aatcattctcaaaaacattatgc

SEQ ID NO: 195 - RNA, 21 nt, synthetic construct
  source 1..21: mol_type = other RNA
aacatgctcattgccttttct

SEQ ID NO: 196 - RNA, 23 nt, synthetic construct
  source 1..23: mol_type = other RNA
agaaaaggcaatgagcatgttct

SEQ ID NO: 197 - RNA, 21 nt, synthetic construct
  source 1..21: mol_type = other RNA
ttgccttttcacagaactttt

SEQ ID NO: 198 - RNA, 23 nt, synthetic construct
  source 1..23: mol_type = other RNA
aaaagttctgtgaaaaggcaatg

SEQ ID NO: 199 - RNA, 21 nt, synthetic construct
  source 1..21: mol_type = other RNA
cttttcacagaactttctgtt

SEQ ID NO: 200 - RNA, 23 nt, synthetic construct
  source 1..23: mol_type = other RNA
aacagaaagttctgtgaaaaggc

SEQ ID NO: 201 - RNA, 21 nt, synthetic construct
  source 1..21: mol_type = other RNA
aagtgactttgtgaaggattt

SEQ ID NO: 202 - RNA, 23 nt, synthetic construct
  source 1..23: mol_type = other RNA
aaatccttcacaaagtcacttct

SEQ ID NO: 203 - RNA, 21 nt, synthetic construct
  source 1..21: mol_type = other RNA
agcattttacaccttgaagat

SEQ ID NO: 204 - RNA, 23 nt, synthetic construct
  source 1..23: mol_type = other RNA
atcttcaaggtgtaaaatgctcc

SEQ ID NO: 205 - RNA, 21 nt, synthetic construct
  source 1..21: mol_type = other RNA
tgtgaaagagtcttttgttat

SEQ ID NO: 206 - RNA, 23 nt, synthetic construct
  source 1..23: mol_type = other RNA
ataacaaaagactctttcacatc

SEQ ID NO: 207 - RNA, 21 nt, synthetic construct
  source 1..21: mol_type = other RNA
actctgctatgcttttgtctt

SEQ ID NO: 208 - RNA, 23 nt, synthetic construct
  source 1..23: mol_type = other RNA
aagacaaaagcatagcagagtcc

SEQ ID NO: 209 - RNA, 21 nt, synthetic construct
  source 1..21: mol_type = other RNA
ctctgctatgcttttgtctgt

SEQ ID NO: 210 - RNA, 23 nt, synthetic construct
  source 1..23: mol_type = other RNA
acagacaaaagcatagcagagtc

SEQ ID NO: 211 - RNA, 21 nt, synthetic construct
  source 1..21: mol_type = other RNA
tggctgttcccacttactgct

SEQ ID NO: 212 - RNA, 23 nt, synthetic construct
  source 1..23: mol_type = other RNA
agcagtaagtgggaacagccaga

SEQ ID NO: 213 - RNA, 21 nt, synthetic construct
  source 1..21: mol_type = other RNA
ccacttactgcacaacaaggt

SEQ ID NO: 214 - RNA, 23 nt, synthetic construct
  source 1..23: mol_type = other RNA
accttgttgtgcagtaagtggga

SEQ ID NO: 215 - RNA, 21 nt, synthetic construct
  source 1..21: mol_type = other RNA
ctgcccactgtattcttcttt

SEQ ID NO: 216 - RNA, 23 nt, synthetic construct
  source 1..23: mol_type = other RNA
aaagaagaatacagtgggcagag

SEQ ID NO: 217 - RNA, 21 nt, synthetic construct
  source 1..21: mol_type = other RNA
acatgctcattgccttttcat

SEQ ID NO: 218 - RNA, 23 nt, synthetic construct
  source 1..23: mol_type = other RNA
atgaaaaggcaatgagcatgttc

SEQ ID NO: 219 - RNA, 21 nt, synthetic construct
  source 1..21: mol_type = other RNA
tgctcattgccttttcacagt

SEQ ID NO: 220 - RNA, 23 nt, synthetic construct
  source 1..23: mol_type = other RNA
actgtgaaaaggcaatgagcatg

SEQ ID NO: 221 - RNA, 21 nt, synthetic construct
  source 1..21: mol_type = other RNA
ttttcacagaactttctgtgt

SEQ ID NO: 222 - RNA, 23 nt, synthetic construct
  source 1..23: mol_type = other RNA
acacagaaagttctgtgaaaagg

SEQ ID NO: 223 - RNA, 21 nt, synthetic construct
  source 1..21: mol_type = other RNA
gagcattttacaccttgaagt

SEQ ID NO: 224 - RNA, 23 nt, synthetic construct
  source 1..23: mol_type = other RNA
acttcaaggtgtaaaatgctccg

SEQ ID NO: 225 - RNA, 21 nt, synthetic construct
  source 1..21: mol_type = other RNA
attttacaccttgaagacgtt

SEQ ID NO: 226 - RNA, 23 nt, synthetic construct
  source 1..23: mol_type = other RNA
aacgtcttcaaggtgtaaaatgc

SEQ ID NO: 227 - RNA, 21 nt, synthetic construct
  source 1..21: mol_type = other RNA
ggatgtgaaagagtcttttgt

SEQ ID NO: 228 - RNA, 23 nt, synthetic construct
  source 1..23: mol_type = other RNA
acaaaagactctttcacatcctc

SEQ ID NO: 229 - RNA, 21 nt, synthetic construct
  source 1..21: mol_type = other RNA
gatgtgaaagagtcttttgtt

SEQ ID NO: 230 - RNA, 23 nt, synthetic construct
  source 1..23: mol_type = other RNA
aacaaaagactctttcacatcct

SEQ ID NO: 231 - RNA, 21 nt, synthetic construct
  source 1..21: mol_type = other RNA
atgtgaaagagtcttttgttt

SEQ ID NO: 232 - RNA, 23 nt, synthetic construct
  source 1..23: mol_type = other RNA
aaacaaaagactctttcacatcc

SEQ ID NO: 233 - RNA, 21 nt, synthetic construct
  source 1..21: mol_type = other RNA
tttttgagaatgattctttct

SEQ ID NO: 234 - RNA, 23 nt, synthetic construct
  source 1..23: mol_type = other RNA
agaaagaatcattctcaaaaaca

SEQ ID NO: 235 - RNA, 21 nt, synthetic construct
  source 1..21: mol_type = other RNA
gactctgctatgcttttgtct

SEQ ID NO: 236 - RNA, 23 nt, synthetic construct
  source 1..23: mol_type = other RNA
agacaaaagcatagcagagtcct

SEQ ID NO: 237 - RNA, 21 nt, synthetic construct
  source 1..21: mol_type = other RNA
gtgaaagagtcttttgttagt

SEQ ID NO: 238 - RNA, 23 nt, synthetic construct
  source 1..23: mol_type = other RNA
actaacaaaagactctttcacat

SEQ ID NO: 239 - RNA, 21 nt, synthetic construct
  source 1..21: mol_type = other RNA
tcgggcataatgtttttgagt

SEQ ID NO: 240 - RNA, 23 nt, synthetic construct
  source 1..23: mol_type = other RNA
actcaaaaacattatgcccgaga

SEQ ID NO: 241 - RNA, 21 nt, synthetic construct
  source 1..21: mol_type = other RNA
ggactctgctatgcttttgtt

SEQ ID NO: 242 - RNA, 23 nt, synthetic construct
  source 1..23: mol_type = other RNA
aacaaaagcatagcagagtcctt

SEQ ID NO: 243 - RNA, 21 nt, synthetic construct
  source 1..21: mol_type = other RNA
ctctgcccactgtattcttct

SEQ ID NO: 244 - RNA, 23 nt, synthetic construct
  source 1..23: mol_type = other RNA
agaagaatacagtgggcagagac

SEQ ID NO: 245 - RNA, 21 nt, synthetic construct
  source 1..21: mol_type = other RNA
tctgcccactgtattcttctt

SEQ ID NO: 246 - RNA, 23 nt, synthetic construct
  source 1..23: mol_type = other RNA
aagaagaatacagtgggcagaga

SEQ ID NO: 247 - RNA, 21 nt, synthetic construct
  source 1..21: mol_type = other RNA
tttagaagtgactttgtgaat

SEQ ID NO: 248 - RNA, 23 nt, synthetic construct
  source 1..23: mol_type = other RNA
attcacaaagtcacttctaaaca

SEQ ID NO: 249 - RNA, 21 nt, synthetic construct
  source 1..21: mol_type = other RNA
acatgaaatagttgtcctagt

SEQ ID NO: 250 - RNA, 23 nt, synthetic construct
  source 1..23: mol_type = other RNA
actaggacaactatttcatgtcc

SEQ ID NO: 251 - RNA, 21 nt, synthetic construct
  source 1..21: mol_type = other RNA
tgaaagagtcttttgttagtt

SEQ ID NO: 252 - RNA, 23 nt, synthetic construct
  source 1..23: mol_type = other RNA
aactaacaaaagactctttcaca

SEQ ID NO: 253 - RNA, 21 nt, synthetic construct
  source 1..21: mol_type = other RNA
aaagagtcttttgttagtctt

SEQ ID NO: 254 - RNA, 23 nt, synthetic construct
  source 1..23: mol_type = other RNA
aagactaacaaaagactctttca

SEQ ID NO: 255 - RNA, 21 nt, synthetic construct
  source 1..21: mol_type = other RNA
ttttgagaatgattctttcct

SEQ ID NO: 256 - RNA, 23 nt, synthetic construct
  source 1..23: mol_type = other RNA
aggaaagaatcattctcaaaaac

SEQ ID NO: 257 - RNA, 21 nt, synthetic construct
  source 1..21: mol_type = other RNA
tttgagaatgattctttcctt

SEQ ID NO: 258 - RNA, 23 nt, synthetic construct
  source 1..23: mol_type = other RNA
aaggaaagaatcattctcaaaaa

SEQ ID NO: 259 - RNA, 21 nt, synthetic construct
  source 1..21: mol_type = other RNA
gtgtgatcaaaacatacaagt

SEQ ID NO: 260 - RNA, 23 nt, synthetic construct
  source 1..23: mol_type = other RNA
acttgtatgttttgatcacacgc

SEQ ID NO: 261 - RNA, 21 nt, synthetic construct
  source 1..21: mol_type = other RNA
ctggctgttcccacttactgt

SEQ ID NO: 262 - RNA, 23 nt, synthetic construct
  source 1..23: mol_type = other RNA
acagtaagtgggaacagccagac

SEQ ID NO: 263 - RNA, 21 nt, synthetic construct
  source 1..21: mol_type = other RNA
gaagaacatgctcattgcctt

SEQ ID NO: 264 - RNA, 23 nt, synthetic construct
  source 1..23: mol_type = other RNA
aaggcaatgagcatgttcttcac

SEQ ID NO: 265 - RNA, 21 nt, synthetic construct
  source 1..21: mol_type = other RNA
gtttagaagtgactttgtgat

SEQ ID NO: 266 - RNA, 23 nt, synthetic construct
  source 1..23: mol_type = other RNA
atcacaaagtcacttctaaacag

SEQ ID NO: 267 - RNA, 21 nt, synthetic construct
  source 1..21: mol_type = other RNA
gaagtgactttgtgaaggatt

SEQ ID NO: 268 - RNA, 23 nt, synthetic construct
  source 1..23: mol_type = other RNA
aatccttcacaaagtcacttcta

SEQ ID NO: 269 - RNA, 21 nt, synthetic construct
  source 1..21: mol_type = other RNA
tgactttgtgaaggattacct

SEQ ID NO: 270 - RNA, 23 nt, synthetic construct
  source 1..23: mol_type = other RNA
aggtaatccttcacaaagtcact

SEQ ID NO: 271 - RNA, 21 nt, synthetic construct
  source 1..21: mol_type = other RNA
gaaagagtcttttgttagtct

SEQ ID NO: 272 - RNA, 23 nt, synthetic construct
  source 1..23: mol_type = other RNA
agactaacaaaagactctttcac

SEQ ID NO: 273 - RNA, 21 nt, synthetic construct
  source 1..21: mol_type = other RNA
ttgagaatgattctttcctgt

SEQ ID NO: 274 - RNA, 23 nt, synthetic construct
  source 1..23: mol_type = other RNA
acaggaaagaatcattctcaaaa

SEQ ID NO: 275 - RNA, 21 nt, synthetic construct
  source 1..21: mol_type = other RNA
cgtgtgatcaaaacatacaat

SEQ ID NO: 276 - RNA, 23 nt, synthetic construct
  source 1..23: mol_type = other RNA
attgtatgttttgatcacacgct

SEQ ID NO: 277 - RNA, 21 nt, synthetic construct
  source 1..21: mol_type = other RNA
aaaggactctgctatgctttt

SEQ ID NO: 278 - RNA, 23 nt, synthetic construct
  source 1..23: mol_type = other RNA
aaaagcatagcagagtccttttt

SEQ ID NO: 279 - RNA, 21 nt, synthetic construct
  source 1..21: mol_type = other RNA
aggactctgctatgcttttgt

SEQ ID NO: 280 - RNA, 23 nt, synthetic construct
  source 1..23: mol_type = other RNA
acaaaagcatagcagagtccttt

SEQ ID NO: 281 - RNA, 21 nt, synthetic construct
  source 1..21: mol_type = other RNA
tctgctatgcttttgtctggt

SEQ ID NO: 282 - RNA, 23 nt, synthetic construct
  source 1..23: mol_type = other RNA
accagacaaaagcatagcagagt

SEQ ID NO: 283 - RNA, 21 nt, synthetic construct
  source 1..21: mol_type = other RNA
tctggctgttcccacttactt

SEQ ID NO: 284 - RNA, 23 nt, synthetic construct
  source 1..23: mol_type = other RNA
aagtaagtgggaacagccagaca

SEQ ID NO: 285 - RNA, 21 nt, synthetic construct
  source 1..21: mol_type = other RNA
cccacttactgcacaacaagt

SEQ ID NO: 286 - RNA, 23 nt, synthetic construct
  source 1..23: mol_type = other RNA
acttgttgtgcagtaagtgggaa

SEQ ID NO: 287 - RNA, 21 nt, synthetic construct
  source 1..21: mol_type = other RNA
tgcccactgtattcttcttgt

SEQ ID NO: 288 - RNA, 23 nt, synthetic construct
  source 1..23: mol_type = other RNA
acaagaagaatacagtgggcaga

SEQ ID NO: 289 - RNA, 21 nt, synthetic construct
  source 1..21: mol_type = other RNA
ctgtgcgacgtggtttattct

SEQ ID NO: 290 - RNA, 23 nt, synthetic construct
  source 1..23: mol_type = other RNA
agaataaaccacgtcgcacagaa

SEQ ID NO: 291 - RNA, 21 nt, synthetic construct
  source 1..21: mol_type = other RNA
tgtgcgacgtggtttattcct

SEQ ID NO: 292 - RNA, 23 nt, synthetic construct
  source 1..23: mol_type = other RNA
aggaataaaccacgtcgcacaga

SEQ ID NO: 293 - RNA, 21 nt, synthetic construct
  source 1..21: mol_type = other RNA
attgagctctgcatctgtctt

SEQ ID NO: 294 - RNA, 23 nt, synthetic construct
  source 1..23: mol_type = other RNA
aagacagatgcagagctcaatag

SEQ ID NO: 295 - RNA, 21 nt, synthetic construct
  source 1..21: mol_type = other RNA
actttgtgaaggattaccctt

SEQ ID NO: 296 - RNA, 23 nt, synthetic construct
  source 1..23: mol_type = other RNA
aagggtaatccttcacaaagtca

SEQ ID NO: 297 - RNA, 21 nt, synthetic construct
  source 1..21: mol_type = other RNA
cactatcccaggaatttgaat

SEQ ID NO: 298 - RNA, 23 nt, synthetic construct
  source 1..23: mol_type = other RNA
attcaaattcctgggatagtgga

SEQ ID NO: 299 - RNA, 21 nt, synthetic construct
  source 1..21: mol_type = other RNA
ggacatgaaatagttgtcctt

SEQ ID NO: 300 - RNA, 23 nt, synthetic construct
  source 1..23: mol_type = other RNA
aaggacaactatttcatgtcccc

SEQ ID NO: 301 - RNA, 21 nt, synthetic construct
  source 1..21: mol_type = other RNA
cattttacaccttgaagacgt

SEQ ID NO: 302 - RNA, 23 nt, synthetic construct
  source 1..23: mol_type = other RNA
acgtcttcaaggtgtaaaatgct

SEQ ID NO: 303 - RNA, 21 nt, synthetic construct
  source 1..21: mol_type = other RNA
tttacaccttgaagacgtact

SEQ ID NO: 304 - RNA, 23 nt, synthetic construct
  source 1..23: mol_type = other RNA
agtacgtcttcaaggtgtaaaat

SEQ ID NO: 305 - RNA, 21 nt, synthetic construct
  source 1..21: mol_type = other RNA
aagaacatgctcattgccttt

SEQ ID NO: 306 - RNA, 23 nt, synthetic construct
  source 1..23: mol_type = other RNA
aaaggcaatgagcatgttcttca

SEQ ID NO: 307 - RNA, 21 nt, synthetic construct
  source 1..21: mol_type = other RNA
tttcacagaactttctgtgct

SEQ ID NO: 308 - RNA, 23 nt, synthetic construct
  source 1..23: mol_type = other RNA
agcacagaaagttctgtgaaaag

SEQ ID NO: 309 - RNA, 21 nt, synthetic construct
  source 1..21: mol_type = other RNA
tcacagaactttctgtgcgat

SEQ ID NO: 310 - RNA, 23 nt, synthetic construct
  source 1..23: mol_type = other RNA
atcgcacagaaagttctgtgaaa

SEQ ID NO: 311 - RNA, 21 nt, synthetic construct
  source 1..21: mol_type = other RNA
tccactatcccaggaatttgt

SEQ ID NO: 312 - RNA, 23 nt, synthetic construct
  source 1..23: mol_type = other RNA
acaaattcctgggatagtggatt

SEQ ID NO: 313 - RNA, 21 nt, synthetic construct
  source 1..21: mol_type = other RNA
ccactatcccaggaatttgat

SEQ ID NO: 314 - RNA, 23 nt, synthetic construct
  source 1..23: mol_type = other RNA
atcaaattcctgggatagtggat

SEQ ID NO: 315 - RNA, 21 nt, synthetic construct
  source 1..21: mol_type = other RNA
actatcccaggaatttgaagt

SEQ ID NO: 316 - RNA, 23 nt, synthetic construct
  source 1..23: mol_type = other RNA
acttcaaattcctgggatagtgg

SEQ ID NO: 317 - RNA, 21 nt, synthetic construct
  source 1..21: mol_type = other RNA
ctatcccaggaatttgaagct

SEQ ID NO: 318 - RNA, 23 nt, synthetic construct
  source 1..23: mol_type = other RNA
agcttcaaattcctgggatagtg

SEQ ID NO: 319 - RNA, 21 nt, synthetic construct
  source 1..21: mol_type = other RNA
gtgaagaacatgctcattgct

SEQ ID NO: 320 - RNA, 23 nt, synthetic construct
  source 1..23: mol_type = other RNA
agcaatgagcatgttcttcaccc

SEQ ID NO: 321 - RNA, 21 nt, synthetic construct
  source 1..21: mol_type = other RNA
cacagaactttctgtgcgact

SEQ ID NO: 322 - RNA, 23 nt, synthetic construct
  source 1..23: mol_type = other RNA
agtcgcacagaaagttctgtgaa

SEQ ID NO: 323 - RNA, 21 nt, synthetic construct
  source 1..21: mol_type = other RNA
ttagaagtgactttgtgaagt

SEQ ID NO: 324 - RNA, 23 nt, synthetic construct
  source 1..23: mol_type = other RNA
acttcacaaagtcacttctaaac

SEQ ID NO: 325 - RNA, 21 nt, synthetic construct
  source 1..21: mol_type = other RNA
gactttgtgaaggattaccct

SEQ ID NO: 326 - RNA, 23 nt, synthetic construct
  source 1..23: mol_type = other RNA
agggtaatccttcacaaagtcac

SEQ ID NO: 327 - RNA, 21 nt, synthetic construct
  source 1..21: mol_type = other RNA
ttacaccttgaagacgtacct

SEQ ID NO: 328 - RNA, 23 nt, synthetic construct
  source 1..23: mol_type = other RNA
aggtacgtcttcaaggtgtaaaa

SEQ ID NO: 329 - RNA, 21 nt, synthetic construct
  source 1..21: mol_type = other RNA
caccttgaagacgtaccctgt

SEQ ID NO: 330 - RNA, 23 nt, synthetic construct
  source 1..23: mol_type = other RNA
acagggtacgtcttcaaggtgta

SEQ ID NO: 331 - RNA, 21 nt, synthetic construct
  source 1..21: mol_type = other RNA
tgagaatgattctttcctgct

SEQ ID NO: 332 - RNA, 23 nt, synthetic construct
  source 1..23: mol_type = other RNA
agcaggaaagaatcattctcaaa

SEQ ID NO: 333 - RNA, 21 nt, synthetic construct
  source 1..21: mol_type = other RNA
acttactgcacaacaaggagt

SEQ ID NO: 334 - RNA, 23 nt, synthetic construct
  source 1..23: mol_type = other RNA
actccttgttgtgcagtaagtgg

SEQ ID NO: 335 - RNA, 21 nt, synthetic construct
  source 1..21: mol_type = other RNA
tctctgcccactgtattcttt

SEQ ID NO: 336 - RNA, 23 nt, synthetic construct
  source 1..23: mol_type = other RNA
aaagaatacagtgggcagagaca

SEQ ID NO: 337 - RNA, 21 nt, synthetic construct
  source 1..21: mol_type = other RNA
ttcacagaactttctgtgcgt

SEQ ID NO: 338 - RNA, 23 nt, synthetic construct
  source 1..23: mol_type = other RNA
acgcacagaaagttctgtgaaaa

SEQ ID NO: 339 - RNA, 21 nt, synthetic construct
  source 1..21: mol_type = other RNA
ttgagctctgcatctgtctgt

SEQ ID NO: 340 - RNA, 23 nt, synthetic construct
  source 1..23: mol_type = other RNA
acagacagatgcagagctcaata

SEQ ID NO: 341 - RNA, 21 nt, synthetic construct
  source 1..21: mol_type = other RNA
tagaagtgactttgtgaaggt

SEQ ID NO: 342 - RNA, 23 nt, synthetic construct
  source 1..23: mol_type = other RNA
accttcacaaagtcacttctaaa

SEQ ID NO: 343 - RNA, 21 nt, synthetic construct
  source 1..21: mol_type = other RNA
gcacaacaaggagctcatggt

SEQ ID NO: 344 - RNA, 23 nt, synthetic construct
  source 1..23: mol_type = other RNA
accatgagctccttgttgtgcag

SEQ ID NO: 345 - RNA, 21 nt, synthetic construct
  source 1..21: mol_type = other RNA
tgagctctgcatctgtctggt

SEQ ID NO: 346 - RNA, 23 nt, synthetic construct
  source 1..23: mol_type = other RNA
accagacagatgcagagctcaat

SEQ ID NO: 347 - RNA, 21 nt, synthetic construct
  source 1..21: mol_type = other RNA
gggacatgaaatagttgtcct

SEQ ID NO: 348 - RNA, 23 nt, synthetic construct
  source 1..23: mol_type = other RNA
aggacaactatttcatgtcccct

SEQ ID NO: 349 - RNA, 21 nt, synthetic construct
  source 1..21: mol_type = other RNA
acaccttgaagacgtaccctt

SEQ ID NO: 350 - RNA, 23 nt, synthetic construct
  source 1..23: mol_type = other RNA
aagggtacgtcttcaaggtgtaa

SEQ ID NO: 351 - RNA, 21 nt, synthetic construct
  source 1..21: mol_type = other RNA
ccctgtgccattccaaagggt

SEQ ID NO: 352 - RNA, 23 nt, synthetic construct
  source 1..23: mol_type = other RNA
accctttggaatggcacagggta

SEQ ID NO: 353 - RNA, 21 nt, synthetic construct
  source 1..21: mol_type = other RNA
cctgtgccattccaaagggat

SEQ ID NO: 354 - RNA, 23 nt, synthetic construct
  source 1..23: mol_type = other RNA
atccctttggaatggcacagggt

SEQ ID NO: 355 - RNA, 21 nt, synthetic construct
  source 1..21: mol_type = other RNA
ctgctatgcttttgtctggct

SEQ ID NO: 356 - RNA, 23 nt, synthetic construct
  source 1..23: mol_type = other RNA
agccagacaaaagcatagcagag

SEQ ID NO: 357 - RNA, 21 nt, synthetic construct
  source 1..21: mol_type = other RNA
cagatcacatgaccttcctgt

SEQ ID NO: 358 - RNA, 23 nt, synthetic construct
  source 1..23: mol_type = other RNA
acaggaaggtcatgtgatctgaa

SEQ ID NO: 359 - RNA, 21 nt, synthetic construct
  source 1..21: mol_type = other RNA
agatcacatgaccttcctgct

SEQ ID NO: 360 - RNA, 23 nt, synthetic construct
  source 1..23: mol_type = other RNA
agcaggaaggtcatgtgatctga

SEQ ID NO: 361 - RNA, 21 nt, synthetic construct
  source 1..21: mol_type = other RNA
acagaactttctgtgcgacgt

SEQ ID NO: 362 - RNA, 23 nt, synthetic construct
  source 1..23: mol_type = other RNA
acgtcgcacagaaagttctgtga

SEQ ID NO: 363-684 - skipped (322 entries)

SEQ ID NO: 685 - protein, 16 aa, synthetic construct
AAVALLPAVLLALLAP

SEQ ID NO: 686 - protein, 11 aa, synthetic construct
AALLPVLLAAP

SEQ ID NO: 687 - protein, 13 aa, Human immunodeficiency virus 1
GRKKRRQRRRPPQ

SEQ ID NO: 688 - protein, 16 aa, Drosophila sp.
RQIKIWFQNRRMKWKK